United States Patent Application Publication US 2005/0136395 A1 - sequence listing, part 7

SEQ ID NO: 238194 - DNA, 29742 bp, SARS Virus
atattaggtttttacctacccaggaaaagccaaccaacctcgatctcttgtagatctgttctctaaacgaactttaaaatctgtgtagctgtcgctcggctgcatgcctagtgcacctacgcagtataaacaataataaattttactgtcgttgacaagaaacgagtaactcgtccctcttctgcagactgcttacggtttcgtccgtgttgcagtcgatcatcagcatacctaggtttcgtccgggtgtgaccgaaaggtaagatggagagccttgttcttggtgtcaacgagaaaacacacgtccaactcagtttgcctgtccttcaggttagagacgtgctagtgcgtggcttcggggactctgtggaagaggccctatcggaggcacgtgaacacctcaaaaatggcacttgtggtctagtagagctggaaaaaggcgtactgccccagcttgaacagccctatgtgttcattaaacgttctgatgccttaagcaccaatcacggccacaaggtcgttgagctggttgcagaaatggacggcattcagtacggtcgtagcggtataacactgggagtactcgtgccacatgtgggcgaaaccccaattgcataccgcaatgttcttcttcgtaagaacggtaataagggagccggtggtcatagctatggcatcgatctaaagtcttatgacttaggtgacgagcttggcactgatcccattgaagattatgaacaaaactggaacactaagcatggcagtggtgcactccgtgaactcactcgtgagctcaatggaggtgcagtcactcgctatgtcgacaacaatttctgtggcccagatgggtaccctcttgattgcatcaaagattttctcgcacgcgcgggcaagtcaatgtgcactctttccgaacaacttgattacatcgagtcgaagagaggtgtctactgctgccgtgaccatgagcatgaaattgcctggttcactgagcgctctgataagagctacgagcaccagacacccttcgaaattaagagtgccaagaaatttgacactttcaaaggggaatgcccaaagtttgtgtttcctcttaactcaaaagtcaaagtcattcaaccacgtgttgaaaagaaaaagactgagggtttcatggggcgtatacgctctgtgtaccctgttgcatctccacaggagtgtaacaatatgcacttgtctaccttgatgaaatgtaatcattgcgatgaagtttcatggcagacgtgcgactttctgaaagccacttgtgaacattgtggcactgaaaatttagttattgaaggacctactacatgtgggtacctacctactaatgctgtagtgaaaatgccatgtcctgcctgtcaagacccagagattggacctgagcatagtgttgcagattatcacaaccactcaaacattgaaactcgactccgcaagggaggtaggactagatgttttggaggctgtgtgtttgcctatgttggctgctataataagcgtgcctactgggttcctcgtgctagtgctgatattggctcaggccatactggcattactggtgacaatgtggagaccttgaatgaggatctccttgagatactgagtcgtgaacgtgttaacattaacattgttggcgattttcatttgaatgaagaggttgccatcattttggcatctttctctgcttctacaagtgcctttattgacactataaagagtcttgattacaagtctttcaaaaccattgttgagtcctgcggtaactataaagttaccaagggaaagcccgtaaaaggtgcttggaacattggacaacagagatcagttttaacaccactgtgtggttttccctcacaggctgctggtgttatcagatcaatttttgcgcgcacacttgatgcagcaaaccactcaattcctgatttgcaaagagcagctgtcaccatacttgatggtatttctgaacagtcattacgtcttgtcgacgccatggtttatacttcagacctgctcaccaacagtgtcattattatggcatatgtaactggtggtcttgtacaacagacttctcagtggttgtctaatcttttgggcactactgttgaaaaactcaggcctatctttgaatggattgaggcgaaacttagtgcaggagttgaatttctcaaggatgcttgggagattctcaaatttctcattacaggtgtttttgacatcgtcaagggtcaaatacaggttgcttcagataacatcaaggattgtgtaaaatgcttcattgatgttgttaacaaggcactcgaaatgtgcattgatcaagtcactatcgctggcgcaaagttgcgatcactcaacttaggtgaagtcttcatcgctcaaagcaagggactttaccgtcagtgtatacgtggcaaggagcagctgcaactactcatgcctcttaaggcaccaaaagaagtaacctttcttgaaggtgattcacatgacacagtacttacctctgaggaggttgttctcaagaacggtgaactcgaagcactcgagacgcccgttgatagcttcacaaatggagctatcgtcggcacaccagtctgtgtaaatggcctcatgctcttagagattaaggacaaagaacaatactgcgcattgtctcctggtttactggctacaaacaatgtctttcgcttaaaagggggtgcaccaattaaaggtgtaacctttggagaagatactgtttgggaagttcaaggttacaagaatgtgagaatcacatttgagcttgatgaacgtgttgacaaagtgcttaatgaaaagtgctctgtctacactgttgaatccggtaccgaagttactgagtttgcatgtgttgtagcagaggctgttgtgaagactttacaaccagtttctgatctccttaccaacatgggtattgatcttgatgagtggagtgtagctacattctacttatttgatgatgctggtgaagaaaacttttcatcacgtatgtattgttccttttaccctccagatgaggaagaagaggacgatgcagagtgtgaggaagaagaaattgatgaaacctgtgaacatgagtacggtacagaggatgattatcaaggtctccctctggaatttggtgcctcagctgaaacagttcgagttgaggaagaagaagaggaagactggctggatgatactactgagcaatcagagattgagccagaaccagaacctacacctgaagaaccagttaatcagtttactggttatttaaaacttactgacaatgttgccattaaatgtgttgacatcgttaaggaggcacaaagtgctaatcctatggtgattgtaaatgctgctaacatacacctgaaacatggtggtggtgtagcaggtgcactcaacaaggcaaccaatggtgccatgcaaaaggagagtgatgattacattaagctaaatggccctcttacagtaggagggtcttgtttgctttctggacataatcttgctaagaagtgtctgcatgttgttggacctaacctaaatgcaggtgaggacatccagcttcttaaggcagcatatgaaaatttcaattcacaggacatcttacttgcaccattgttgtcagcaggcatatttggtgctaaaccacttcagtctttacaagtgtgcgtgcagacggttcgtacacaggtttatattgcagtcaatgacaaagctctttatgagcaggttgtcatggattatcttgataacctgaagcctagagtggaagcacctaaacaagaggagccaccaaacacagaagattccaaaactgaggagaaatctgtcgtacagaagcctgtcgatgtgaagccaaaaattaaggcctgcattgatgaggttaccacaacactggaagaaactaagtttcttaccaataagttactcttgtttgctgatatcaatggtaagctttaccatgattctcagaacatgcttagaggtgaagatatgtctttccttgagaaggatgcaccttacatggtaggtgatgttatcactagtggtgatatcacttgtgttgtaataccctccaaaaaggctggtggcactactgagatgctctcaagagctttgaagaaagtgccagttgatgagtatataaccacgtaccctggacaaggatgtgctggttatacacttgaggaagctaagactgctcttaagaaatgcaaatctgcattttatgtactaccttcagaagcacctaatgctaaggaagagattctaggaactgtatcctggaatttgagagaaatgcttgctcatgctgaagagacaagaaaattaatgcctatatgcatggatgttagagccataatggcaaccatccaacgtaagtataaaggaattaaaattcaagagggcatcgttgactatggtgtccgattcttcttttatactagtaaagagcctgtagcttctattattacgaagctgaactctctaaatgagccgcttgtcacaatgccaattggttatgtgacacatggttttaatcttgaagaggctgcgcgctgtatgcgttctcttaaagctcctgccgtagtgtcagtatcatcaccagatgctgttactacatataatggatacctcacttcgtcatcaaagacatctgaggagcactttgtagaaacagtttctttggctggctcttacagagattggtcctattcaggacagcgtacagagttaggtgttgaatttcttaagcgtggtgacaaaattgtgtaccacactctggagagccccgtcgagtttcatcttgacggtgaggttctttcacttgacaaactaaagagtctcttatccctgcgggaggttaagactataaaagtgttcacaactgtggacaacactaatctccacacacagcttgtggatatgtctatgacatatggacagcagtttggtccaacatacttggatggtgctgatgttacaaaaattaaacctcatgtaaatcatgagggtaagactttctttgtactacctagtgatgacacactacgtagtgaagctttcgagtactaccatactcttgatgagagttttcttggtaggtacatgtctgctttaaaccacacaaagaaatggaaatttcctcaagttggtggtttaacttcaattaaatgggctgataacaattgttatttgtctagtgttttattagcacttcaacagcttgaagtcaaattcaatgcaccagcacttcaagaggcttattatagagcccgtgctggtgatgctgctaacttttgtgcactcatactcgcttacagtaataaaactgttggcgagcttggtgatgtcagagaaactatgacccatcttctacagcatgctaatttggaatctgcaaagcgagttcttaatgtggtgtgtaaacattgtggtcagaaaactactaccttaacgggtgtagaagctgtgatgtatatgggtactctatcttatgataatcttaagacaggtgtttccattccatgtgtgtgtggtcgtgatgctacacaatatctagtacaacaagagtcttcttttgttatgatgtctgcaccacctgctgagtataaattacagcaaggtacattcttatgtgcgaatgagtacactggtaactatcagtgtggtcattacactcatataactgctaaggagaccctctatcgtattgacggagctcaccttacaaagatgtcagagtacaaaggaccagtgactgatgttttctacaaggaaacatcttacactacaaccatcaagcctgtgtcgtataaactcgatggagttacttacacagagattgaaccaaaattggatgggtattataaaaaggataatgcttactatacagagcagcctatagaccttgtaccaactcaaccattaccaaatgcgagttttgataatttcaaactcacatgttctaacacaaaatttgctgatgatttaaatcaaatgacaggcttcacaaagccagcttcacgagagctatctgtcacattcttcccagacttgaatggcgatgtagtggctattgactatagacactattcagcgagtttcaagaaaggtgctaaattactgcataagccaattgtttggcacattaaccaggctacaaccaagacaacgttcaaaccaaacacttggtgtttacgttgtctttggagtacaaagccagtagatacttcaaattcatttgaagttctggcagtagaagacacacaaggaatggacaatcttgcttgtgaaagtcaacaacccacctctgaagaagtagtggaaaatcctaccatacagaaggaagtcatagagtgtgacgtgaaaactaccgaagttgtaggcaatgtcatacttaaaccatcagatgaaggtgttaaagtaacacaagagttaggtcatgaggatcttatggctgcttatgtggaaaacacaagcattaccattaagaaacctaatgagctttcactagccttaggtttaaaaacaattgccactcatggtattgctgcaattaatagtgttccttggagtaaaattttggcttatgtcaaaccattcttaggacaagcagcaattacaacatcaaattgcgctaagagattagcacaacgtgtgtttaacaattatatgccttatgtgtttacattattgttccaattgtgtacttttactaaaagtaccaattctagaattagagcttcactacctacaactattgctaaaaatagtgttaagagtgttgctaaattatgtttggatgccggcattaattatgtgaagtcacccaaattttctaaattgttcacaatcgctatgtggctattgttgttaagtatttgcttaggttctctaatctgtgtaactgctgcttttggtgtactcttatctaattttggtgctccttcttattgtaatggcgttagagaattgtatcttaattcgtctaacgttactactatggatttctgtgaaggttcttttccttgcagcatttgtttaagtggattagactcccttgattcttatccagctcttgaaaccattcaggtgacgatttcatcgtacaagctagacttgacaattttaggtctggccgctgagtgggttttggcatatatgttgttcacaaaattcttttatttattaggtctttcagctataatgcaggtgttctttggctattttgctagtcatttcatcagcaattcttggctcatgtggtttatcattagtattgtacaaatggcacccgtttctgcaatggttaggatgtacatcttctttgcttctttctactacatatggaagagctatgttcatatcatggatggttgcacctcttcgacttgcatgatgtgctataagcgcaatcgtgccacacgcgttgagtgtacaactattgttaatggcatgaagagatctttctatgtctatgcaaatggaggccgtggcttctgcaagactcacaattggaattgtctcaattgtgacacattttgcactggtagtacattcattagtgatgaagttgctcgtgatttgtcactccagtttaaaagaccaatcaaccctactgaccagtcatcgtatattgttgatagtgttgctgtgaaaaatggcgcgcttcacctctactttgacaaggctggtcaaaagacctatgagagacatccgctctcccattttgtcaatttagacaatttgagagctaacaacactaaaggttcactgcctattaatgtcatagtttttgatggcaagtccaaatgcgacgagtctgcttctaagtctgcttctgtgtactacagtcagctgatgtgccaacctattctgttgcttgaccaagctcttgtatcaaacgttggagatagtactgaagtttccgttaagatgtttgatgcttatgtcgacaccttttcagcaacttttagtgttcctatggaaaaacttaaggcacttgttgctacagctcacagcgagttagcaaagggtgtagctttagatggtgtcctttctacattcgtgtcagctgcccgacaaggtgttgttgataccgatgttgacacaaaggatgttattgaatgtctcaaactttcacatcactctgacttagaagtgacaggtgacagttgtaacaatttcatgctcacctataataaggttgaaaacatgacgcccagagatcttggcgcatgtattgactgtaatgcaaggcatatcaatgcccaagtagcaaaaagtcacaatgtttcactcatctggaatgtaaaagactacatgtctttatctgaacagctgcgtaaacaaattcgtactgctgccaagaagaacaacataccttttacactaacttgtgctacaactagacaggttgtcaatgtcataactactaaaatctcactcaagggtggtaagattgttagtacttgttttaaacttatgcttaaggccacattattgtgcgttcttgctgcattggtttgttatatcgttatgccagtacatacattgtcaatccatgatggttacacaaatgaaatcattggttacaaagccattcaggatggtgtcactcgtgacatcatttctactgatgattgttttgcaaataaacatgctggttttgacgcatggtttagccagcgtggtggttcatacaaaaatgacaaaagctgccctgtagtagctgctatcattacaagagagattggtttcatagtgcctggcttaccgggtactgtgctgagagcaatcaatggtgacttcttgcattttctacctcgtgtttttagtgctgttggcaacatttgctacacaccttccaaactcattgagtatagtgattttgctacctctgcttgcgttcttgctgctgagtgtacaatttttaaggatgctatgggcaaacctgtgccatattgttatgacactaatttgctagagggttctatttcttatagtgagcttcgtccagacactcgttatgtgcttatggatggttccatcatacagtttcctaacacttacctggagggttctgttagagtagtaacaacttttgatgctgagtactgtagacatggtacatgcgaaaggtcagaagtaggtatttgcctatctaccagtggtagatgggttcttaataatgagcattacagagctctatcaggagttttctgtggtgttgatgcgatgaatctcatagctaacatctttactcctcttgtgcaacctgtgggtgctttagatgtgtctgcttcagtagtggctggtggtattattgccatattggtgacttgtgctgcctactactttatgaaattcagacgtgtttttggtgagtacaaccatgttgttgctgctaatgcacttttgtttttgatgtctttcactatactctgtctggtaccagcttacagctttctgccgggagtctactcagtcttttacttgtacttgacattctatttcaccaatgatgtttcattcttggctcaccttcaatggtttgccatgttttctcctattgtgcctttttggataacagcaatctatgtattctgtatttctctgaagcactgccattggttctttaacaactatcttaggaaaagagtcatgtttaatggagttacatttagtaccttcgaggaggctgctttgtgtacctttttgctcaacaaggaaatgtacctaaaattgcgtagcgagacactgttgccacttacacagtataacaggtatcttgctctatataacaagtacaagtatttcagtggagccttagatactaccagctatcgtgaagcagcttgctgccacttagcaaaggctctaaatgactttagcaactcaggtgctgatgttctctaccaaccaccacagacatcaatcacttctgctgttctgcagagtggttttaggaaaatggcattcccgtcaggcaaagttgaagggtgcatggtacaagtaacctgtggaactacaactcttaatggattgtggttggatgacacagtatactgtccaagacatgtcatttgcacagcagaagacatgcttaatcctaactatgaagatctgctcattcgcaaatccaaccatagctttcttgttcaggctggcaatgttcaacttcgtgttattggccattctatgcaaaattgtctgcttaggcttaaagttgatacttctaaccctaagacacccaagtataaatttgtccgtatccaacctggtcaaacattttcagttctagcatgctacaatggttcaccatctggtgtttatcagtgtgccatgagacctaatcataccattaaaggttctttccttaatggatcatgtggtagtgttggttttaacattgattatgattgcgtgtctttctgctatatgcatcatatggagcttccaacaggagtacacgctggtactgacttagaaggtaaattctatggtccatttgttgacagacaaactgcacaggctgcaggtacagacacaaccataacattaaatgttttggcatggctgtatgctgctgttatcaatggtgataggtggtttcttaatagattcaccactactttgaatgactttaaccttgtggcaatgaagtacaactatgaacctttgacacaagatcatgttgacatattgggacctctttctgctcaaacaggaattgccgtcttagatatgtgtgctgctttgaaagagctgctgcagaatggtatgaatggtcgtactatccttggtagcactattttagaagatgagtttacaccatttgatgttgttagacaatgctctggtgttaccttccaaggtaagttcaagaaaattgttaagggcactcatcattggatgcttttaactttcttgacatcactattgattcttgttcaaagtacacagtggtcactgtttttctttgtttacgagaatgctttcttgccatttactcttggtattatggcaattgctgcatgtgctatgctgcttgttaagcataagcacgcattcttgtgcttgtttctgttaccttctcttgcaacagttgcttactttaatatggtctacatgcctgctagctgggtgatgcgtatcatgacatggcttgaattggctgacactagcttgtctggttataggcttaaggattgtgttatgtatgcttcagctttagttttgcttattctcatgacagctcgcactgtttatgatgatgctgctagacgtgtttggacactgatgaatgtcattacacttgtttacaaagtctactatggtaatgctttagatcaagctatttccatgtgggccttagttatttctgtaacctctaactattctggtgtcgttacgactatcatgtttttagctagagctatagtgtttgtgtgtgttgagtattacccattgttatttattactggcaacaccttacagtgtatcatgcttgtttattgtttcttaggctattgttgctgctgctactttggccttttctgtttactcaaccgttacttcaggcttactcttggtgtttatgactacttggtctctacacaagaatttaggtatatgaactcccaggggcttttgcctcctaagagtagtattgatgctttcaagcttaacattaagttgttgggtattggaggtaaaccatgtatcaaggttgctactgtacagtctaaaatgtctgacgtaaagtgcacatctgtggtactgctctcggttcttcaacaacttagagtagagtcatcttctaaattgtgggcacaatgtgtacaactccacaatgatattcttcttgcaaaagacacaactgaagctttcgagaagatggtttctcttttgtctgttttgctatccatgcagggtgctgtagacattaataggttgtgcgaggaaatgctcgataaccgtgctactcttcaggctattgcttcagaatttagttctttaccatcatatgccgcttatgccactgcccaggaggcctatgagcaggctgtagctaatggtgattctgaagtcgttctcaaaaagttaaagaaatctttgaatgtggctaaatctgagtttgaccgtgatgctgccatgcaacgcaagttggaaaagatggcagatcaggctatgacccaaatgtacaaacaggcaagatctgaggacaagagggcaaaagtaactagtgctatgcaaacaatgctcttcactatgcttaggaagcttgataatgatgcacttaacaacattatcaacaatgcgcgtgatggttgtgttccactcaacatcataccattgactacagcagccaaactcatggttgttgtccctgattatggtacctacaagaacacttgtgatggtaacacctttacatatgcatctgcactctgggaaatccagcaagttgttgatgcggatagcaagattgttcaacttagtgaaattaacatggacaattcaccaaatttggcttggcctcttattgttacagctctaagagccaactcagctgttaaactacagaataatgaactgagtccagtagcactacgacagatgtcctgtgcggctggtaccacacaaacagcttgtactgatgacaatgcacttgcctactataacaattcgaagggaggtaggtttgtgctggcattactatcagaccaccaagatctcaaatgggctagattccctaagagtgatggtacaggtacaatttacacagaactggaaccaccttgtaggtttgttacagacacaccaaaagggcctaaagtgaaatacttgtacttcatcaaaggcttaaacaacctaaatagaggtatggtgctgggcagtttagctgctacagtacgtcttcaggctggaaatgctacagaagtacctgccaattcaactgtgctttccttctgtgcttttgcagtagaccctgctaaagcatataaggattacctagcaagtggaggacaaccaatcaccaactgtgtgaagatgttgtgtacacacactggtacaggacaggcaattactgtaacaccagaagctaacatggaccaagagtcctttggtggtgcttcatgttgtctgtattgtagatgccacattgaccatccaaatcctaaaggattctgtgacttgaaaggtaagtacgtccaaatacctaccacttgtgctaatgacccagtgggttttacacttagaaacacagtctgtaccgtctgcggaatgtggaaaggttatggctgtagttgtgaccaactccgcgaacccttgatgcagtctgcggatgcatcaacgtttttaaacgggtttgcggtgtaagtgcagcccgtcttacaccgtgcggcacaggcactagtactgatgtcgtctacagggcttttgatatttacaacgaaaaaagtgctggttttgcaaagttcctaaaaactaattgctgtcgcttccaggagaaggatgaggaaggcaatttattagactcttactttgtagttaagaggcatactatgtctaactaccaacatgaagagactatttataacttggttaaagattgtccagcggttgctgtccatgactttttcaagtttagagtagatggtgacatggtaccacatatatcacgtcagcgtctaactaaatacacaatggctgatttagtctatgctctacgtcattttgatgagggtaattgtgatacattaaaagaaatactcgtcacatacaattgctgtgatgatgattatttcaataagaaggattggtatgacttcgtagagaatcctgacatcttacgcgtatatgctaacttaggtgagcgtgtacgccaatcattattaaagactgtacaattctgcgatgctatgcgtgatgcaggcattgtaggcgtactgacattagataatcaggatcttaatgggaactggtacgatttcggtgatttcgtacaagtagcaccaggctgcggagttcctattgtggattcatattactcattgctgatgcccatcctcactttgactagggcattggctgctgagtcccatatggatgctgatctcgcaaaaccacttattaagtgggatttgctgaaatatgattttacggaagagagactttgtctcttcgaccgttattttaaatattgggaccagacataccatcccaattgtattaactgtttggatgataggtgtatccttcattgtgcaaactttaatgtgttattttctactgtgtttccacctacaagttttggaccactagtaagaaaaatatttgtagatggtgttccttttgttgtttcaactggataccattttcgtgagttaggagtcgtacataatcaggatgtaaacttacatagctcgcgtctcagtttcaaggaacttttagtgtatgctgctgatccagctatgcatgcagcttctggcaatttattgctagataaacgcactacatgcttttcagtagctgcactaacaaacaatgttgcttttcaaactgtcaaacccggtaattttaataaagacttttatgactttgctgtgtctaaaggtttctttaaggaaggaagttctgttgaactaaaacacttcttctttgctcaggatggcaacgctgctatcagtgattatgactattatcgttataatctgccaacaatgtgtgatatcagacaactcctattcgtagttgaagttgttgataaatactttgattgttacgatggtggctgtattaatgccaaccaagtaatcgttaacaatctggataaatcagctggtttcccatttaataaatggggtaaggctagactttattatgactcaatgagttatgaggatcaagatgcacttttcgcgtatactaagcgtaatgtcatccctactataactcaaatgaatcttaagtatgccattagtgcaaagaatagagctcgcaccgtagctggtgtctctatctgtagtactatgacaaatagacagtttcatcagaaattattgaagtcaatagccgccactagaggagctactgtggtaattggaacaagcaagttttacggtggctggcataatatgttaaaaactgtttacagtgatgtagaaactccacaccttatgggttgggattatccaaaatgtgacagagccatgcctaacatgcttaggataatggcctctcttgttcttgctcgcaaacataacacttgctgtaacttatcacaccgtttctacaggttagctaacgagtgtgcgcaagtattaagtgagatggtcatgtgtggcggctcactatatgttaaaccaggtggaacatcatccggtgatgctacaactgcttatgctaatagtgtctttaacatttgtcaagctgttacagccaatgtaaatgcacttctttcaactgatggtaataagatagctgacaagtatgtccgcaatctacaacacaggctctatgagtgtctctatagaaatagggatgttgatcatgaattcgtggatgagttttacgcttacctgcgtaaacatttctccatgatgattctttctgatgatgccgttgtgtgctataacagtaactatgcggctcaaggtttagtagctagcattaagaactttaaggcagttctttattatcaaaataatgtgttcatgtctgaggcaaaatgttggactgagactgaccttactaaaggacctcacgaattttgctcacagcatacaatgctagttaaacaaggagatgattacgtgtacctgccttacccagatccatcaagaatattaggcgcaggctgttttgtcgatgatattgtcaaaacagatggtacacttatgattgaaaggttcgtgtcactggctattgatgcttacccacttacaaaacatcctaatcaggagtatgctgatgtctttcacttgtatttacaatacattagaaagttacatgatgagcttactggccacatgttggacatgtattccgtaatgctaactaatgataacacctcacggtactgggaacctgagttttatgaggctatgtacacaccacatacagtcttgcaggctgtaggtgcttgtgtattgtgcaattcacagacttcacttcgttgcggtgcctgtattaggagaccattcctatgttgcaagtgctgctatgaccatgtcatttcaacatcacacaaattagtgttgtctgttaatccctatgtttgcaatgccccaggttgtgatgtcactgatgtgacacaactgtatctaggaggtatgagctattattgcaagtcacataagcctcccattagttttccattatgtgctaatggtcaggtttttggtttatacaaaaacacatgtgtaggcagtgacaatgtcactgacttcaatgcgatagcaacatgtgattggactaatgctggcgattacatacttgccaacacttgtactgagagactcaagcttttcgcagcagaaacgctcaaagccactgaggaaacatttaagctgtcatatggtattgccactgtacgcgaagtactctctgacagagaattgcatctttcatgggaggttggaaaacctagaccaccattgaacagaaactatgtctttactggttaccgtgtaactaaaaatagtaaagtacagattggagagtacacctttgaaaaaggtgactatggtgatgctgttgtgtacagaggtactacgacatacaagttgaatgttggtgattactttgtgttgacatctcacactgtaatgccacttagtgcacctactctagtgccacaagagcactatgtgagaattactggcttgtacccaacactcaacatctcagatgagttttctagcaatgttgcaaattatcaaaaggtcggcatgcaaaagtactctacactccaaggaccacctggtactggtaagagtcattttgccatcggacttgctctctattacccatctgctcgcatagtgtatacggcatgctctcatgcagctgttgatgccctatgtgaaaaggcattaaaatatttgcccatagataaatgtagtagaatcatacctgcgcgtgcgcgcgtagagtgttttgataaattcaaagtgaattcaacactagaacagtatgttttctgcactgtaaatgcattgccagaaacaactgctgacattgtagtctttgatgaaatctctatggctactaattatgacttgagtgttgtcaatgctagacttcgtgcaaaacactacgtctatattggcgatcctgctcaattaccagccccccgcacattgctgactaaaggcacactagaaccagaatattttaattcagtgtgcagacttatgaaaacaataggtccagacatgttccttggaacttgtcgccgttgtcctgctgaaattgttgacactgtgagtgctttagtttatgacaataagctaaaagcacacaaggataagtcagctcaatgcttcaaaatgttctacaaaggtgttattacacatgatgtttcatctgcaatcaacagacctcaaataggcgttgtaagagaatttcttacacgcaatcctgcttggagaaaagctgtttttatctcaccttataattcacagaacgctgtagcttcaaaaatcttaggattgcctacgcagactgttgattcatcacagggttctgaatatgactatgtcatattcacacaaactactgaaacagcacactcttgtaatgtcaaccgcttcaatgtggctatcacaagggcaaaaattggcattttgtgcataatgtctgatagagatctttatgacaaactgcaatttacaagtctagaaataccacgtcgcaatgtggctacattacaagcagaaaatgtaactggactttttaaggactgtagtaagatcattactggtcttcatcctacacaggcacctacacacctcagcgttgatataaaattcaagactgaaggattatgtgttgacataccaggcataccaaaggacatgacctaccgtagactcatctctatgatgggtttcaaaatgaattaccaagtcaatggttaccctaatatgtttatcacccgcgaagaagctattcgtcacgttcgtgcgtggattggctttgatgtagagggctgtcatgcaactagagatgctgtgggtactaacctacctctccagctaggattttctacaggtgttaacttagtagctgtaccgactggttatgttgacactgaaaataacacagaattcaccagagttaatgcaaaacctccaccaggtgaccagtttaaacatcttataccactcatgtataaaggcttgccctggaatgtagtgcgtattaagatagtacaaatgctcagtgatacactgaaaggattgtcagacagagtcgtgttcgtcctttgggcgcatggctttgagcttacatcaatgaagtactttgtcaagattggacctgaaagaacgtgttgtctgtgtgacaaacgtgcaacttgcttttctacttcatcagatacttatgcctgctggaatcattctgtgggttttgactatgtctataacccatttatgattgatgttcagcagtggggctttacgggtaaccttcagagtaaccatgaccaacattgccaggtacatggaaatgcacatgtggctagttgtgatgctatcatgactagatgtttagcagtccatgagtgctttgttaagcgcgttgattggtctgttgaataccctattataggagatgaactgagggttaattctgcttgcagaaaagtacaacacatggttgtgaagtctgcattgcttgctgataagtttccagttcttcatgacattggaaatccaaaggctatcaagtgtgtgcctcaggctgaagtagaatggaagttctacgatgctcagccatgtagtgacaaagcttacaaaatagaggaactcttctattcttatgctacacatcacgataaattcactgatggtgtttgtttgttttggaattgtaacgttgatcgttacccagccaatgcaattgtgtgtaggtttgacacaagagtcttgtcaaacttgaacttaccaggctgtgatggtggtagtttgtatgtgaataagcatgcattccacactccagctttcgataaaagtgcatttactaatttaaagcaattgcctttcttttactattctgatagtccttgtgagtctcatggcaaacaagtagtgtcggatattgattatgttccactcaaatctgctacgtgtattacacgatgcaatttaggtggtgctgtttgcagacaccatgcaaatgagtaccgacagtacttggatgcatataatatgatgatttctgctggatttagcctatggatttacaaacaatttgatacttataacctgtggaatacatttaccaggttacagagtttagaaaatgtggcttataatgttgttaataaaggacactttgatggacacgccggcgaagcacctgtttccatcattaataatgctgtttacacaaaggtagatggtattgatgtggagatctttgaaaataagacaacacttcctgttaatgttgcatttgagctttgggctaagcgtaacattaaaccagtgccagagattaagatactcaataatttgggtgttgatatcgctgctaatactgtaatctgggactacaaaagagaagccccagcacatgtatctacaataggtgtctgcacaatgactgacattgccaagaaacctactgagagtgcttgttcttcacttactgtcttgtttgatggtagagtggaaggacaggtagacctttttagaaacgcccgtaatggtgttttaataacagaaggttcagtcaaaggtctaacaccttcaaagggaccagcacaagctagcgtcaatggagtcacattaattggagaatcagtaaaaacacagtttaactactttaagaaagtagacggcattattcaacagttgcctgaaacctactttactcagagcagagacttagaggattttaagcccagatcacaaatggaaactgactttctcgagctcgctatggatgaattcatacagcgatataagctcgagggctatgccttcgaacacatcgtttatggagatttcagtcatggacaacttggcggtcttcatttaatgataggcttagccaagcgctcacaagattcaccacttaaattagaggattttatccctatggacagcacagtgaaaaattacttcataacagatgcgcaaacaggttcatcaaaatgtgtgtgttctgtgattgatcttttacttgatgactttgtcgagataataaagtcacaagatttgtcagtgatttcaaaagtggtcaaggttacaattgactatgctgaaatttcattcatgctttggtgtaaggatggacatgttgaaaccttctacccaaaactacaagcaagtcaagcgtggcaaccaggtgttgcgatgcctaacttgtacaagatgcaaagaatgcttcttgaaaagtgtgaccttcagaattatggtgaaaatgctgttataccaaaaggaataatgatgaatgtcgcaaagtatactcaactgtgtcaatacttaaatacacttactttagctgtaccctacaacatgagagttattcactttggtgctggctctgataaaggagttgcaccaggtacagctgtgctcagacaatggttgccaactggcacactacttgtcgattcagatcttaatgacttcgtctccgacgcagattctactttaattggagactgtgcaacagtacatacggctaataaatgggaccttattattagcgatatgtatgaccctaggaccaaacatgtgacaaaagagaatgactctaaagaagggtttttcacttatctgtgtggatttataaagcaaaaactagccctgggtggttctatagctgtaaagataacagagcattcttggaatgctgacctttacaagcttatgggccatttctcatggtggacagcttttgttacaaatgtaaatgcatcatcatcggaagcatttttaattggggctaactatcttggcaagccgaaggaacaaattgatggctataccatgcatgctaactacattttctggaggaacacaaatcctatccagttgtcttcctattcactctttgacatgagcaaatttcctcttaaattaagaggaactgctgtaatgtctcttaaggagaatcaaatcaatgatatgatttattctcttctggaaaaaggtaggcttatcattagagaaaacaacagagttgtggtttcaagtgatattcttgttaacaactaaacgaacatgtttattttcttattatttcttactctcactagtggtagtgaccttgaccggtgcaccacttttgatgatgttcaagctcctaattacactcaacatacttcatctatgaggggggtttactatcctgatgaaatttttagatcagacactctttatttaactcaggatttatttcttccattttattctaatgttacagggtttcatactattaatcatacgtttggcaaccctgtcataccttttaaggatggtatttattttgctgccacagagaaatcaaatgttgtccgtggttgggtttttggttctaccatgaacaacaagtcacagtcggtgattattattaacaattctactaatgttgttatacgagcatgtaactttgaattgtgtgacaaccctttctttgctgtttctaaacccatgggtacacagacacatactatgatattcgataatgcatttaattgcactttcgagtacatatctgatgccttttcgcttgatgtttcagaaaagtcaggtaattttaaacacttacgagagtttgtgtttaaaaataaagatgggtttctctatgtttataagggctatcaacctatagatgtagttcgtgatctaccttctggttttaacactttgaaacctatttttaagttgcctcttggtattaacattacaaattttagagccattcttacagccttttcacctgctcaagacatttggggcacgtcagctgcagcctattttgttggctatttaaagccaactacatttatgctcaagtatgatgaaaatggtacaatcacagatgctgttgattgttctcaaaatccacttgctgaactcaaatgctctgttaagagctttgagattgacaaaggaatttaccagacctctaatttcagggttgttccctcaggagatgttgtgagattccctaatattacaaacttgtgtccttttggagaggtttttaatgctactaaattcccttctgtctatgcatgggagagaaaaaaaatttctaattgtgttgctgattactctgtgctctacaactcaacatttttttcaacctttaagtgctatggcgtttctgccactaagttgaatgatctttgcttctccaatgtctatgcagattcttttgtagtcaagggagatgatgtaagacaaatagcgccaggacaaactggtgttattgctgattataattataaattgccagatgatttcatgggttgtgtccttgcttggaatactaggaacattgatgctacttcaactggtaattataattataaatataggtatcttagacatggcaagcttaggccctttgagagagacatatctaatgtgcctttctcccctgatggcaaaccttgcaccccacctgctcttaattgttattggccattaaatgattatggtttttacaccactactggcattggctaccaaccttacagagttgtagtactttcttttgaacttttaaatgcaccggccacggtttgtggaccaaaattatccactgaccttattaagaaccagtgtgtcaattttaattttaatggactcactggtactggtgtgttaactccttcttcaaagagatttcaaccatttcaacaatttggccgtgatgtttctgatttcactgattccgttcgagatcctaaaacatctgaaatattagacatttcaccttgctcttttgggggtgtaagtgtaattacacctggaacaaatgcttcatctgaagttgctgttctatatcaagatgttaactgcactgatgtttctacagcaattcatgcagatcaactcacaccagcttggcgcatatattctactggaaacaatgtattccagactcaagcaggctgtcttataggagctgagcatgtcgacacttcttatgagtgcgacattcctattggagctggcatttgtgctagttaccatacagtttctttattacgtagtactagccaaaaatctattgtggcttatactatgtctttaggtgctgatagttcaattgcttactctaataacaccattgctatacctactaacttttcaattagcattactacagaagtaatgcctgtttctatggctaaaacctccgtagattgtaatatgtacatctgcggagattctactgaatgtgctaatttgcttctccaatatggtagcttttgcacacaactaaatcgtgcactctcaggtattgctgctgaacaggatcgcaacacacgtgaagtgttcgctcaagtcaaacaaatgtacaaaaccccaactttgaaatattttggtggttttaatttttcacaaatattacctgaccctctaaagccaactaagaggtcttttattgaggacttgctctttaataaggtgacactcgctgatgctggcttcatgaagcaatatggcgaatgcctaggtgatattaatgctagagatctcatttgtgcgcagaagttcaatggacttacagtgttgccacctctgctcactgatgatatgattgctgcctacactgctgctctagttagtggtactgccactgctggatggacatttggtgctggcgctgctcttcaaataccttttgctatgcaaatggcatataggttcaatggcattggagttacccaaaatgttctctatgagaaccaaaaacaaatcgccaaccaatttaacaaggcgattagtcaaattcaagaatcacttacaacaacatcaactgcattgggcaagctgcaagacgttgttaaccagaatgctcaagcattaaacacacttgttaaacaacttagctctaattttggtgcaatttcaagtgtgctaaatgatatcctttcgcgacttgataaagtcgaggcggaggtacaaattgacaggttaattacaggcagacttcaaagccttcaaacctatgtaacacaacaactaatcagggctgctgaaatcagggcttctgctaatcttgctgctactaaaatgtctgagtgtgttcttggacaatcaaaaagagttgacttttgtggaaagggctaccaccttatgtccttcccacaagcagccccgcatggtgttgtcttcctacatgtcacgtatgtgccatcccaggagaggaacttcaccacagcgccagcaatttgtcatgaaggcaaagcatacttccctcgtgaaggtgtttttgtgtttaatggcacttcttggtttattacacagaggaacttcttttctccacaaataattactacagacaatacatttgtctcaggaaattgtgatgtcgttattggcatcattaacaacacagtttatgatcctctgcaacctgagcttgactcattcaaagaagagctggacaagtacttcaaaaatcatacatcaccagatgttgatcttggcgacatttcaggcattaacgcttctgtcgtcaacattcaaaaagaaattgaccgcctcaatgaggtcgctaaaaatttaaatgaatcactcattgaccttcaagaattgggaaaatatgagcaatatattaaatggccttggtatgtttggctcggcttcattgctggactaattgccatcgtcatggttacaatcttgctttgttgcatgactagttgttgcagttgcctcaagggtgcatgctcttgtggttcttgctgcaagtttgatgaggatgactctgagccagttctcaagggtgtcaaattacattacacataaacgaacttatggatttgtttatgagattttttactcttggatcaattactgcacagccagtaaaaattgacaatgcttctcctgcaagtactgttcatgctacagcaacgataccgctacaagcctcactccctttcggatggcttgttattggcgttgcatttcttgctgtttttcagagcgctaccaaaataattgcgctcaataaaagatggcagctagccctttataagggcttccagttcatttgcaatttactgctgctatttgttaccatctattcacatcttttgcttgtcgctgcaggtaaggaggcgcaatttttgtacctctatgccttgatatattttctacaatgcatcaacgcatgtagaattattatgagatgttggctttgttggaagtgcaaatccaagaacccattactttatgatgccaactactttgtttgctggcacacacataactatgactactgtataccatataacagtgtcacagatacaattgtcgttactgaaggtgacggcatttcaacaccaaaactcaaagaagactaccaaattggtggttattctgaggataggcactcaggtgttaaagactatgtcgttgtacatggctatttcaccgaagtttactaccagcttgagtctacacaaattactacagacactggtattgaaaatgctacattcttcatctttaacaagcttgttaaagacccaccgaatgtgcaaatacacacaatcgacggctcttcaggagttgctaatccagcaatggatccaatttatgatgagccgacgacgactactagcgtgcctttgtaagcacaagaaagtgagtacgaacttatgtactcattcgtttcggaagaaacaggtacgttaatagttaatagcgtacttctttttcttgctttcgtggtattcttgctagtcacactagccatccttactgcgcttcgattgtgtgcgtactgctgcaatattgttaacgtgagtttagtaaaaccaacggtttacgtctactcgcgtgttaaaaatctgaactcttctgaaggagttcctgatcttctggtctaaacgaactaactattattattattctgtttggaactttaacattgcttatcatggcagacaacggtactattaccgttgaggagcttaaacaactcctggaacaatggaacctagtaataggtttcctattcctagcctggattatgttactacaatttgcctattctaatcggaacaggtttttgtacataataaagcttgttttcctctggctcttgtggccagtaacacttgcttgttttgtgcttgctgttgtctacagaattaattgggtgactggcgggattgcgattgcaatggcttgtattgtaggcttgatgtggcttagctacttcgttgcttccttcaggctgtttgctcgtacccgctcaatgtggtcattcaacccagaaacaaacattcttctcaatgtgcctctccgggggacaattgtgaccagaccgctcatggaaagtgaacttgtcattggtgctgtgatcattcgtggtcacttgcgaatggccggacactccctagggcgctgtgacattaaggacctgccaaaagagatcactgtggctacatcacgaacgctttcttattacaaattaggagcgtcgcagcgtgtaggcactgattcaggttttgctgcatacaaccgctaccgtattggaaactataaattaaatacagaccacgccggtagcaacgacaatattgctttgctagtacagtaagtgacaacagatgtttcatcttgttgacttccaggttacaatagcagagatattgattatcattatgaggactttcaggattgctatttggaatcttgacgttataataagttcaatagtgagacaattatttaagcctctaactaagaagaattattcggagttagatgatgaagaacctatggagttagattatccataaaacgaacatgaaaattattctcttcctgacattgattgtatttacatcttgcgagctatatcactatcaggagtgtgttagaggtacgactgtactactaaaagaaccttgcccatcaggaacatacgagggcaattcaccatttcaccctcttgctgacaataaatttgcactaacttgcactagcacacactttgcttttgcttgtgctgacggtactcgacatacctatcagctgcgtgcaagatcagtttcaccaaaacttttcatcagacaagaggaggttcaacaagagctctactcgccactttttctcattgttgctgctctagtatttttaatactttgcttcaccattaagagaaagacagaatgaatgagctcactttaattgacttctatttgtgctttttagcctttctgctattccttgttttaataatgcttattatattttggttttcactcgaaatccaggatctagaagaaccttgtaccaaagtctaaacgaacatgaaacttctcattgttttgacttgtatttctctatgcagttgcatatgcactgtagtacagcgctgtgcatctaataaacctcatgtgcttgaagatccttgtaaggtacaacactaggggtaatacttatagcactgcttggctttgtgctctaggaaaggttttaccttttcatagatggcacactatggttcaaacatgcacacctaatgttactatcaactgtcaagatccagctggtggtgcgcttatagctaggtgttggtaccttcatgaaggtcaccaaactgctgcatttagagacgtacttgttgttttaaataaacgaacaaattaaaatgtctgataatggaccccaatcaaaccaacgtagtgccccccgcattacatttggtggacccacagattcaactgacaataaccagaatggaggacgcaatggggcaaggccaaaacagcgccgaccccaaggtttacccaataatactgcgtcttggttcacagctctcactcagcatggcaaggaggaacttagattccctcgaggccagggcgttccaatcaacaccaatagtggtccagatgaccaaattggctactaccgaagagctacccgacgagttcgtggtggtgacggcaaaatgaaagagctcagccccagatggtacttctattacctaggaactggcccagaagcttcacttccctacggcgctaacaaagaaggcatcgtatgggttgcaactgagggagccttgaatacacccaaagaccacattggcacccgcaatcctaataacaatgctgccaccgtgctacaacttcctcaaggaacaacattgccaaaaggcttctacgcagagggaagcagaggcggcagtcaagcctcttctcgctcctcatcacgtagtcgcggtaattcaagaaattcaactcctggcagcagtaggggaaattctcctgctcgaatggctagcggaggtggtgaaactgccctcgcgctattgctgctagacagattgaaccagcttgagagcaaagtttctggtaaaggccaacaacaacaaggccaaactgtcactaagaaatctgctgctgaggcatctaaaaagcctcgccaaaaacgtactgccacaaaacagtacaacgtcactcaagcatttgggagacgtggtccagaacaaacccaaggaaatttcggggaccaagacctaatcagacaaggaactgattacaaacattggccgcaaattgcacaatttgctccaagtgcctctgcattctttggaatgtcacgcattggcatggaagtcacaccttcgggaacatggctgacttatcatggagccattaaattggatgacaaagatccacaattcaaagacaacgtcatactgctgaacaagcacattgacgcatacaaaacattcccaccaacagagcctaaaaaggacaaaaagaaaaagactgatgaagctcagcctttgccgcagagacaaaagaagcagcccactgtgactcttcttcctgcggctgacatggatgatttctccagacaacttcaaaattccatgagtggagcttctgctgattcaactcaggcataaacactcatgatgaccacacaaggcagatgggctatgtaaacgttttcgcaattccgtttacgatacatagtctactcttgtgcagaatgaattctcgtaactaaacagcacaagtaggtttagttaactttaatctcacatagcaatctttaatcaatgtgtaacattagggaggacttgaaagagccaccacattttcatcgaggccacgcggagtacgatcgagggtacagtgaataatgctagggagagctgcctatatggaagagccctaatgtgtaaaattaattttagtagtgctatccccatgtgattttaatagcttcttaggagaatgacaaaaaaaaaaaaaaa

SEQ ID NO: 238195 - DNA, 29751 bp, SARS Virus
atattaggtttttacctacccaggaaaagccaaccaacctcgatctcttgtagatctgttctctaaacgaactttaaaatctgtgtagctgtcgctcggctgcatgcctagtgcacctacgcagtataaacaataataaattttactgtcgttgacaagaaacgagtaactcgtccctcttctgcagactgcttacggtttcgtccgtgttgcagtcgatcatcagcatacctaggtttcgtccgggtgtgaccgaaaggtaagatggagagccttgttcttggtgtcaacgagaaaacacacgtccaactcagtttgcctgtccttcaggttagagacgtgctagtgcgtggcttcggggactctgtggaagaggccctatcggaggcacgtgaacacctcaaaaatggcacttgtggtctagtagagctggaaaaaggcgtactgccccagcttgaacagccctatgtgttcattaaacgttctgatgccttaagcaccaatcacggccacaaggtcgttgagctggttgcagaaatggacggcattcagtacggtcgtagcggtataacactgggagtactcgtgccacatgtgggcgaaaccccaattgcataccgcaatgttcttcttcgtaagaacggtaataagggagccggtggtcatagctatggcatcgatctaaagtcttatgacttaggtgacgagcttggcactgatcccattgaagattatgaacaaaactggaacactaagcatggcagtggtgcactccgtgaactcactcgtgagctcaatggaggtgcagtcactcgctatgtcgacaacaatttctgtggcccagatgggtaccctcttgattgcatcaaagattttctcgcacgcgcgggcaagtcaatgtgcactctttccgaacaacttgattacatcgagtcgaagagaggtgtctactgctgccgtgaccatgagcatgaaattgcctggttcactgagcgctctgataagagctacgagcaccagacacccttcgaaattaagagtgccaagaaatttgacactttcaaaggggaatgcccaaagtttgtgtttcctcttaactcaaaagtcaaagtcattcaaccacgtgttgaaaagaaaaagactgagggtttcatggggcgtatacgctctgtgtaccctgttgcatctccacaggagtgtaacaatatgcacttgtctaccttgatgaaatgtaatcattgcgatgaagtttcatggcagacgtgcgactttctgaaagccacttgtgaacattgtggcactgaaaatttagttattgaaggacctactacatgtgggtacctacctactaatgctgtagtgaaaatgccatgtcctgcctgtcaagacccagagattggacctgagcatagtgttgcagattatcacaaccactcaaacattgaaactcgactccgcaagggaggtaggactagatgttttggaggctgtgtgtttgcctatgttggctgctataataagcgtgcctactgggttcctcgtgctagtgctgatattggctcaggccatactggcattactggtgacaatgtggagaccttgaatgaggatctccttgagatactgagtcgtgaacgtgttaacattaacattgttggcgattttcatttgaatgaagaggttgccatcattttggcatctttctctgcttctacaagtgcctttattgacactataaagagtcttgattacaagtctttcaaaaccattgttgagtcctgcggtaactataaagttaccaagggaaagcccgtaaaaggtgcttggaacattggacaacagagatcagttttaacaccactgtgtggttttccctcacaggctgctggtgttatcagatcaatttttgcgcgcacacttgatgcagcaaaccactcaattcctgatttgcaaagagcagctgtcaccatacttgatggtatttctgaacagtcattacgtcttgtcgacgccatggtttatacttcagacctgctcaccaacagtgtcattattatggcatatgtaactggtggtcttgtacaacagacttctcagtggttgtctaatcttttgggcactactgttgaaaaactcaggcctatctttgaatggattgaggcgaaacttagtgcaggagttgaatttctcaaggatgcttgggagattctcaaatttctcattacaggtgtttttgacatcgtcaagggtcaaatacaggttgcttcagataacatcaaggattgtgtaaaatgcttcattgatgttgttaacaaggcactcgaaatgtgcattgatcaagtcactatcgctggcgcaaagttgcgatcactcaacttaggtgaagtcttcatcgctcaaagcaagggactttaccgtcagtgtatacgtggcaaggagcagctgcaactactcatgcctcttaaggcaccaaaagaagtaacctttcttgaaggtgattcacatgacacagtacttacctctgaggaggttgttctcaagaacggtgaactcgaagcactcgagacgcccgttgatagcttcacaaatggagctatcgttggcacaccagtctgtgtaaatggcctcatgctcttagagattaaggacaaagaacaatactgcgcattgtctcctggtttactggctacaaacaatgtctttcgcttaaaagggggtgcaccaattaaaggtgtaacctttggagaagatactgtttgggaagttcaaggttacaagaatgtgagaatcacatttgagcttgatgaacgtgttgacaaagtgcttaatgaaaagtgctctgtctacactgttgaatccggtaccgaagttactgagtttgcatgtgttgtagcagaggctgttgtgaagactttacaaccagtttctgatctccttaccaacatgggtattgatcttgatgagtggagtgtagctacattctacttatttgatgatgctggtgaagaaaacttttcatcacgtatgtattgttccttttaccctccagatgaggaagaagaggacgatgcagagtgtgaggaagaagaaattgatgaaacctgtgaacatgagtacggtacagaggatgattatcaaggtctccctctggaatttggtgcctcagctgaaacagttcgagttgaggaagaagaagaggaagactggctggatgatactactgagcaatcagagattgagccagaaccagaacctacacctgaagaaccagttaatcagtttactggttatttaaaacttactgacaatgttgccattaaatgtgttgacatcgttaaggaggcacaaagtgctaatcctatggtgattgtaaatgctgctaacatacacctgaaacatggtggtggtgtagcaggtgcactcaacaaggcaaccaatggtgccatgcaaaaggagagtgatgattacattaagctaaatggccctcttacagtaggagggtcttgtttgctttctggacataatcttgctaagaagtgtctgcatgttgttggacctaacctaaatgcaggtgaggacatccagcttcttaaggcagcatatgaaaatttcaattcacaggacatcttacttgcaccattgttgtcagcaggcatatttggtgctaaaccacttcagtctttacaagtgtgcgtgcagacggttcgtacacaggtttatattgcagtcaatgacaaagctctttatgagcaggttgtcatggattatcttgataacctgaagcctagagtggaagcacctaaacaagaggagccaccaaacacagaagattccaaaactgaggagaaatctgtcgtacagaagcctgtcgatgtgaagccaaaaattaaggcctgcattgatgaggttaccacaacactggaagaaactaagtttcttaccaataagttactcttgtttgctgatatcaatggtaagctttaccatgattctcagaacatgcttagaggtgaagatatgtctttccttgagaaggatgcaccttacatggtaggtgatgttatcactagtggtgatatcacttgtgttgtaataccctccaaaaaggctggtggcactactgagatgctctcaagagctttgaagaaagtgccagttgatgagtatataaccacgtaccctggacaaggatgtgctggttatacacttgaggaagctaagactgctcttaagaaatgcaaatctgcattttatgtactaccttcagaagcacctaatgctaaggaagagattctaggaactgtatcctggaatttgagagaaatgcttgctcatgctgaagagacaagaaaattaatgcctatatgcatggatgttagagccataatggcaaccatccaacgtaagtataaaggaattaaaattcaagagggcatcgttgactatggtgtccgattcttcttttatactagtaaagagcctgtagcttctattattacgaagctgaactctctaaatgagccgcttgtcacaatgccaattggttatgtgacacatggttttaatcttgaagaggctgcgcgctgtatgcgttctcttaaagctcctgccgtagtgtcagtatcatcaccagatgctgttactacatataatggatacctcacttcgtcatcaaagacatctgaggagcactttgtagaaacagtttctttggctggctcttacagagattggtcctattcaggacagcgtacagagttaggtgttgaatttcttaagcgtggtgacaaaattgtgtaccacactctggagagccccgtcgagtttcatcttgacggtgaggttctttcacttgacaaactaaagagtctcttatccctgcgggaggttaagactataaaagtgttcacaactgtggacaacactaatctccacacacagcttgtggatatgtctatgacatatggacagcagtttggtccaacatacttggatggtgctgatgttacaaaaattaaacctcatgtaaatcatgagggtaagactttctttgtactacctagtgatgacacactacgtagtgaagctttcgagtactaccatactcttgatgagagttttcttggtaggtacatgtctgctttaaaccacacaaagaaatggaaatttcctcaagttggtggtttaacttcaattaaatgggctgataacaattgttatttgtctagtgttttattagcacttcaacagcttgaagtcaaattcaatgcaccagcacttcaagaggcttattatagagcccgtgctggtgatgctgctaacttttgtgcactcatactcgcttacagtaataaaactgttggcgagcttggtgatgtcagagaaactatgacccatcttctacagcatgctaatttggaatctgcaaagcgagttcttaatgtggtgtgtaaacattgtggtcagaaaactactaccttaacgggtgtagaagctgtgatgtatatgggtactctatcttatgataatcttaagacaggtgtttccattccatgtgtgtgtggtcgtgatgctacacaatatctagtacaacaagagtcttcttttgttatgatgtctgcaccacctgctgagtataaattacagcaaggtacattcttatgtgcgaatgagtacactggtaactatcagtgtggtcattacactcatataactgctaaggagaccctctatcgtattgacggagctcaccttacaaagatgtcagagtacaaaggaccagtgactgatgttttctacaaggaaacatcttacactacaaccatcaagcctgtgtcgtataaactcgatggagttacttacacagagattgaaccaaaattggatgggtattataaaaaggataatgcttactatacagagcagcctatagaccttgtaccaactcaaccattaccaaatgcgagttttgataatttcaaactcacatgttctaacacaaaatttgctgatgatttaaatcaaatgacaggcttcacaaagccagcttcacgagagctatctgtcacattcttcccagacttgaatggcgatgtagtggctattgactatagacactattcagcgagtttcaagaaaggtgctaaattactgcataagccaattgtttggcacattaaccaggctacaaccaagacaacgttcaaaccaaacacttggtgtttacgttgtctttggagtacaaagccagtagatacttcaaattcatttgaagttctggcagtagaagacacacaaggaatggacaatcttgcttgtgaaagtcaacaacccacctctgaagaagtagtggaaaatcctaccatacagaaggaagtcatagagtgtgacgtgaaaactaccgaagttgtaggcaatgtcatacttaaaccatcagatgaaggtgttaaagtaacacaagagttaggtcatgaggatcttatggctgcttatgtggaaaacacaagcattaccattaagaaacctaatgagctttcactagccttaggtttaaaaacaattgccactcatggtattgctgcaattaatagtgttccttggagtaaaattttggcttatgtcaaaccattcttaggacaagcagcaattacaacatcaaattgcgctaagagattagcacaacgtgtgtttaacaattatatgccttatgtgtttacattattgttccaattgtgtacttttactaaaagtaccaattctagaattagagcttcactacctacaactattgctaaaaatagtgttaagagtgttgctaaattatgtttggatgccggcattaattatgtgaagtcacccaaattttctaaattgttcacaatcgctatgtggctattgttgttaagtatttgcttaggttctctaatctgtgtaactgctgcttttggtgtactcttatctaattttggtgctccttcttattgtaatggcgttagagaattgtatcttaattcgtctaacgttactactatggatttctgtgaaggttcttttccttgcagcatttgtttaagtggattagactcccttgattcttatccagctcttgaaaccattcaggtgacgatttcatcgtacaagctagacttgacaattttaggtctggccgctgagtgggttttggcatatatgttgttcacaaaattcttttatttattaggtctttcagctataatgcaggtgttctttggctattttgctagtcatttcatcagcaattcttggctcatgtggtttatcattagtattgtacaaatggcacccgtttctgcaatggttaggatgtacatcttctttgcttctttctactacatatggaagagctatgttcatatcatggatggttgcacctcttcgacttgcatgatgtgctataagcgcaatcgtgccacacgcgttgagtgtacaactattgttaatggcatgaagagatctttctatgtctatgcaaatggaggccgtggcttctgcaagactcacaattggaattgtctcaattgtgacacattttgcactggtagtacattcattagtgatgaagttgctcgtgatttgtcactccagtttaaaagaccaatcaaccctactgaccagtcatcgtatattgttgatagtgttgctgtgaaaaatggcgcgcttcacctctactttgacaaggctggtcaaaagacctatgagagacatccgctctcccattttgtcaatttagacaatttgagagctaacaacactaaaggttcactgcctattaatgtcatagtttttgatggcaagtccaaatgcgacgagtctgcttctaagtctgcttctgtgtactacagtcagctgatgtgccaacctattctgttgcttgaccaagctcttgtatcagacgttggagatagtactgaagtttccgttaagatgtttgatgcttatgtcgacaccttttcagcaacttttagtgttcctatggaaaaacttaaggcacttgttgctacagctcacagcgagttagcaaagggtgtagctttagatggtgtcctttctacattcgtgtcagctgcccgacaaggtgttgttgataccgatgttgacacaaaggatgttattgaatgtctcaaactttcacatcactctgacttagaagtgacaggtgacagttgtaacaatttcatgctcacctataataaggttgaaaacatgacgcccagagatcttggcgcatgtattgactgtaatgcaaggcatatcaatgcccaagtagcaaaaagtcacaatgtttcactcatctggaatgtaaaagactacatgtctttatctgaacagctgcgtaaacaaattcgtagtgctgccaagaagaacaacataccttttagactaacttgtgctacaactagacaggttgtcaatgtcataactactaaaatctcactcaagggtggtaagattgttagtacttgttttaaacttatgcttaaggccacattattgtgcgttcttgctgcattggtttgttatatcgttatgccagtacatacattgtcaatccatgatggttacacaaatgaaatcattggttacaaagccattcaggatggtgtcactcgtgacatcatttctactgatgattgttttgcaaataaacatgctggttttgacgcatggtttagccagcgtggtggttcatacaaaaatgacaaaagctgccctgtagtagctgctatcattacaagagagattggtttcatagtgcctggcttaccgggtactgtgctgagagcaatcaatggtgacttcttgcattttctacctcgtgtttttagtgctgttggcaacatttgctacacaccttccaaactcattgagtatagtgattttgctacctctgcttgcgttcttgctgctgagtgtacaatttttaaggatgctatgggcaaacctgtgccatattgttatgacactaatttgctagagggttctatttcttatagtgagcttcgtccagacactcgttatgtgcttatggatggttccatcatacagtttcctaacacttacctggagggttctgttagagtagtaacaacttttgatgctgagtactgtagacatggtacatgcgaaaggtcagaagtaggtatttgcctatctaccagtggtagatgggttcttaataatgagcattacagagctctatcaggagttttctgtggtgttgatgcgatgaatctcatagctaacatctttactcctcttgtgcaacctgtgggtgctttagatgtgtctgcttcagtagtggctggtggtattattgccatattggtgacttgtgctgcctactactttatgaaattcagacgtgtttttggtgagtacaaccatgttgttgctgctaatgcacttttgtttttgatgtctttcactatactctgtctggtaccagcttacagctttctgccgggagtctactcagtcttttacttgtacttgacattctatttcaccaatgatgtttcattcttggctcaccttcaatggtttgccatgttttctcctattgtgcctttttggataacagcaatctatgtattctgtatttctctgaagcactgccattggttctttaacaactatcttaggaaaagagtcatgtttaatggagttacatttagtaccttcgaggaggctgctttgtgtacctttttgctcaacaaggaaatgtacctaaaattgcgtagcgagacactgttgccacttacacagtataacaggtatcttgctctatataacaagtacaagtatttcagtggagccttagatactaccagctatcgtgaagcagcttgctgccacttagcaaaggctctaaatgactttagcaactcaggtgctgatgttctctaccaaccaccacagacatcaatcacttctgctgttctgcagagtggttttaggaaaatggcattcccgtcaggcaaagttgaagggtgcatggtacaagtaacctgtggaactacaactcttaatggattgtggttggatgacacagtatactgtccaagacatgtcatttgcacagcagaagacatgcttaatcctaactatgaagatctgctcattcgcaaatccaaccatagctttcttgttcaggctggcaatgttcaacttcgtgttattggccattctatgcaaaattgtctgcttaggcttaaagttgatacttctaaccctaagacacccaagtataaatttgtccgtatccaacctggtcaaacattttcagttctagcatgctacaatggttcaccatctggtgtttatcagtgtgccatgagacctaatcataccattaaaggttctttccttaatggatcatgtggtagtgttggttttaacattgattatgattgcgtgtctttctgctatatgcatcatatggagcttccaacaggagtacacgctggtactgacttagaaggtaaattctatggtccatttgttgacagacaaactgcacaggctgcaggtacagacacaaccataacattaaatgttttggcatggctgtatgctgctgttatcaatggtgataggtggtttcttaatagattcaccactactttgaatgactttaaccttgtggcaatgaagtacaactatgaacctttgacacaagatcatgttgacatattgggacctctttctgctcaaacaggaattgccgtcttagatatgtgtgctgctttgaaagagctgctgcagaatggtatgaatggtcgtactatccttggtagcactattttagaagatgagtttacaccatttgatgttgttagacaatgctctggtgttaccttccaaggtaagttcaagaaaattgttaagggcactcatcattggatgcttttaactttcttgacatcactattgattcttgttcaaagtacacagtggtcactgtttttctttgtttacgagaatgctttcttgccatttactcttggtattatggcaattgctgcatgtgctatgctgcttgttaagcataagcacgcattcttgtgcttgtttctgttaccttctcttgcaacagttgcttactttaatatggtctacatgcctgctagctgggtgatgcgtatcatgacatggcttgaattggctgacactagcttgtctggttataggcttaaggattgtgttatgtatgcttcagctttagttttgcttattctcatgacagctcgcactgtttatgatgatgctgctagacgtgtttggacactgatgaatgtcattacacttgtttacaaagtctactatggtaatgctttagatcaagctatttccatgtgggccttagttatttctgtaacctctaactattctggtgtcgttacgactatcatgtttttagctagagctatagtgtttgtgtgtgttgagtattacccattgttatttattactggcaacaccttacagtgtatcatgcttgtttattgtttcttaggctattgttgctgctgctactttggccttttctgtttactcaaccgttacttcaggcttactcttggtgtttatgactacttggtctctacacaagaatttaggtatatgaactcccaggggcttttgcctcctaagagtagtattgatgctttcaagcttaacattaagttgttgggtattggaggtaaaccatgtatcaaggttgctactgtacagtctaaaatgtctgacgtaaagtgcacatctgtggtactgctctcggttcttcaacaacttagagtagagtcatcttctaaattgtgggcacaatgtgtacaactccacaatgatattcttcttgcaaaagacacaactgaagctttcgagaagatggtttctcttttgtctgttttgctatccatgcagggtgctgtagacattaataggttgtgcgaggaaatgctcgataaccgtgctactcttcaggctattgcttcagaatttagttctttaccatcatatgccgcttatgccactgcccaggaggcctatgagcaggctgtagctaatggtgattctgaagtcgttctcaaaaagttaaagaaatctttgaatgtggctaaatctgagtttgaccgtgatgctgccatgcaacgcaagttggaaaagatggcagatcaggctatgacccaaatgtacaaacaggcaagatctgaggacaagagggcaaaagtaactagtgctatgcaaacaatgctcttcactatgcttaggaagcttgataatgatgcacttaacaacattatcaacaatgcgcgtgatggttgtgttccactcaacatcataccattgactacagcagccaaactcatggttgttgtccctgattatggtacctacaagaacacttgtgatggtaacacctttacatatgcatctgcactctgggaaatccagcaagttgttgatgcggatagcaagattgttcaacttagtgaaattaacatggacaattcaccaaatttggcttggcctcttattgttacagctctaagagccaactcagctgttaaactacagaataatgaactgagtccagtagcactacgacagatgtcctgtgcggctggtaccacacaaacagcttgtactgatgacaatgcacttgcctactataacaattcgaagggaggtaggtttgtgctggcattactatcagaccaccaagatctcaaatgggctagattccctaagagtgatggtacaggtacaatttacacagaactggaaccaccttgtaggtttgttacagacacaccaaaagggcctaaagtgaaatacttgtacttcatcaaaggcttaaacaacctaaatagaggtatggtgctgggcagtttagctgctacagtacgtcttcaggctggaaatgctacagaagtacctgccaattcaactgtgctttccttctgtgcttttgcagtagaccctgctaaagcatataaggattacctagcaagtggaggacaaccaatcaccaactgtgtgaagatgttgtgtacacacactggtacaggacaggcaattactgtaacaccagaagctaacatggaccaagagtcctttggtggtgcttcatgttgtctgtattgtagatgccacattgaccatccaaatcctaaaggattctgtgacttgaaaggtaagtacgtccaaatacctaccacttgtgctaatgacccagtgggttttacacttagaaacacagtctgtaccgtctgcggaatgtggaaaggttatggctgtagttgtgaccaactccgcgaacccttgatgcagtctgcggatgcatcaacgtttttaaacgggtttgcggtgtaagtgcagcccgtcttacaccgtgcggcacaggcactagtactgatgtcgtctacagggcttttgatatttacaacgaaaaagttgctggttttgcaaagttcctaaaaactaattgctgtcgcttccaggagaaggatgaggaaggcaatttattagactcttactttgtagttaagaggcatactatgtctaactaccaacatgaagagactatttataacttggttaaagattgtccagcggttgctgtccatgactttttcaagtttagagtagatggtgacatggtaccacatatatcacgtcagcgtctaactaaatacacaatggctgatttagtctatgctctacgtcattttgatgagggtaattgtgatacattaaaagaaatactcgtcacatacaattgctgtgatgatgattatttcaataagaaggattggtatgacttcgtagagaatcctgacatcttacgcgtatatgctaacttaggtgagcgtgtacgccaatcattattaaagactgtacaattctgcgatgctatgcgtgatgcaggcattgtaggcgtactgacattagataatcaggatcttaatgggaactggtacgatttcggtgatttcgtacaagtagcaccaggctgcggagttcctattgtggattcatattactcattgctgatgcccatcctcactttgactagggcattggctgctgagtcccatatggatgctgatctcgcaaaaccacttattaagtgggatttgctgaaatatgattttacggaagagagactttgtctcttcgaccgttattttaaatattgggaccagacataccatcccaattgtattaactgtttggatgataggtgtatccttcattgtgcaaactttaatgtgttattttctactgtgtttccacctacaagttttggaccactagtaagaaaaatatttgtagatggtgttccttttgttgtttcaactggataccattttcgtgagttaggagtcgtacataatcaggatgtaaacttacatagctcgcgtctcagtttcaaggaacttttagtgtatgctgctgatccagctatgcatgcagcttctggcaatttattgctagataaacgcactacatgcttttcagtagctgcactaacaaacaatgttgcttttcaaactgtcaaacccggtaattttaataaagacttttatgactttgctgtgtctaaaggtttctttaaggaaggaagttctgttgaactaaaacacttcttctttgctcaggatggcaacgctgctatcagtgattatgactattatcgttataatctgccaacaatgtgtgatatcagacaactcctattcgtagttgaagttgttgataaatactttgattgttacgatggtggctgtattaatgccaaccaagtaatcgttaacaatctggataaatcagctggtttcccatttaataaatggggtaaggctagactttattatgactcaatgagttatgaggatcaagatgcacttttcgcgtatactaagcgtaatgtcatccctactataactcaaatgaatcttaagtatgccattagtgcaaagaatagagctcgcaccgtagctggtgtctctatctgtagtactatgacaaatagacagtttcatcagaaattattgaagtcaatagccgccactagaggagctactgtggtaattggaacaagcaagttttacggtggctggcataatatgttaaaaactgtttacagtgatgtagaaactccacaccttatgggttgggattatccaaaatgtgacagagccatgcctaacatgcttaggataatggcctctcttgttcttgctcgcaaacataacacttgctgtaacttatcacaccgtttctacaggttagctaacgagtgtgcgcaagtattaagtgagatggtcatgtgtggcggctcactatatgttaaaccaggtggaacatcatccggtgatgctacaactgcttatgctaatagtgtctttaacatttgtcaagctgttacagccaatgtaaatgcacttctttcaactgatggtaataagatagctgacaagtatgtccgcaatctacaacacaggctctatgagtgtctctatagaaatagggatgttgatcatgaattcgtggatgagttttacgcttacctgcgtaaacatttctccatgatgattctttctgatgatgccgttgtgtgctataacagtaactatgcggctcaaggtttagtagctagcattaagaactttaaggcagttctttattatcaaaataatgtgttcatgtctgaggcaaaatgttggactgagactgaccttactaaaggacctcacgaattttgctcacagcatacaatgctagttaaacaaggagatgattacgtgtacctgccttacccagatccatcaagaatattaggcgcaggctgttttgtcgatgatattgtcaaaacagatggtacacttatgattgaaaggttcgtgtcactggctattgatgcttacccacttacaaaacatcctaatcaggagtatgctgatgtctttcacttgtatttacaatacattagaaagttacatgatgagcttactggccacatgttggacatgtattccgtaatgctaactaatgataacacctcacggtactgggaacctgagttttatgaggctatgtacacaccacatacagtcttgcaggctgtaggtgcttgtgtattgtgcaattcacagacttcacttcgttgcggtgcctgtattaggagaccattcctatgttgcaagtgctgctatgaccatgtcatttcaacatcacacaaattagtgttgtctgttaatccctatgtttgcaatgccccaggttgtgatgtcactgatgtgacacaactgtatctaggaggtatgagctattattgcaagtcacataagcctcccattagttttccattatgtgctaatggtcaggtttttggtttatacaaaaacacatgtgtaggcagtgacaatgtcactgacttcaatgcgatagcaacatgtgattggactaatgctggcgattacatacttgccaacacttgtactgagagactcaagcttttcgcagcagaaacgctcaaagccactgaggaaacatttaagctgtcatatggtattgccactgtacgcgaagtactctctgacagagaattgcatctttcatgggaggttggaaaacctagaccaccattgaacagaaactatgtctttactggttaccgtgtaactaaaaatagtaaagtacagattggagagtacacctttgaaaaaggtgactatggtgatgctgttgtgtacagaggtactacgacatacaagttgaatgttggtgattactttgtgttgacatctcacactgtaatgccacttagtgcacctactctagtgccacaagagcactatgtgagaattactggcttgtacccaacactcaacatctcagatgagttttctagcaatgttgcaaattatcaaaaggtcggcatgcaaaagtactctacactccaaggaccacctggtactggtaagagtcattttgccatcggacttgctctctattacccatctgctcgcatagtgtatacggcatgctctcatgcagctgttgatgccctatgtgaaaaggcattaaaatatttgcccatagataaatgtagtagaatcatacctgcgcgtgcgcgcgtagagtgttttgataaattcaaagtgaattcaacactagaacagtatgttttctgcactgtaaatgcattgccagaaacaactgctgacattgtagtctttgatgaaatctctatggctactaattatgacttgagtgttgtcaatgctagacttcgtgcaaaacactacgtctatattggcgatcctgctcaattaccagccccccgcacattgctgactaaaggcacactagaaccagaatattttaattcagtgtgcagacttatgaaaacaataggtccagacatgttccttggaacttgtcgccgttgtcctgctgaaattgttgacactgtgagtgctttagtttatgacaataagctaaaagcacacaaggataagtcagctcaatgcttcaaaatgttctacaaaggtgttattacacatgatgtttcatctgcaatcaacagacctcaaataggcgttgtaagagaatttcttacacgcaatcctgcttggagaaaagctgtttttatctcaccttataattcacagaacgctgtagcttcaaaaatcttaggattgcctacgcagactgttgattcatcacagggttctgaatatgactatgtcatattcacacaaactactgaaacagcacactcttgtaatgtcaaccgcttcaatgtggctatcacaagggcaaaaattggcattttgtgcataatgtctgatagagatctttatgacaaactgcaatttacaagtctagaaataccacgtcgcaatgtggctacattacaagcagaaaatgtaactggactttttaaggactgtagtaagatcattactggtcttcatcctacacaggcacctacacacctcagcgttgatataaagttcaagactgaaggattatgtgttgacataccaggcataccaaaggacatgacctaccgtagactcatctctatgatgggtttcaaaatgaattaccaagtcaatggttaccctaatatgtttatcacccgcgaagaagctattcgtcacgttcgtgcgtggattggctttgatgtagagggctgtcatgcaactagagatgctgtgggtactaacctacctctccagctaggattttctacaggtgttaacttagtagctgtaccgactggttatgttgacactgaaaataacacagaattcaccagagttaatgcaaaacctccaccaggtgaccagtttaaacatcttataccactcatgtataaaggcttgccctggaatgtagtgcgtattaagatagtacaaatgctcagtgatacactgaaaggattgtcagacagagtcgtgttcgtcctttgggcgcatggctttgagcttacatcaatgaagtactttgtcaagattggacctgaaagaacgtgttgtctgtgtgacaaacgtgcaacttgcttttctacttcatcagatacttatgcctgctggaatcattctgtgggttttgactatgtctataacccatttatgattgatgttcagcagtggggctttacgggtaaccttcagagtaaccatgaccaacattgccaggtacatggaaatgcacatgtggctagttgtgatgctatcatgactagatgtttagcagtccatgagtgctttgttaagcgcgttgattggtctgttgaataccctattataggagatgaactgagggttaattctgcttgcagaaaagtacaacacatggttgtgaagtctgcattgcttgctgataagtttccagttcttcatgacattggaaatccaaaggctatcaagtgtgtgcctcaggctgaagtagaatggaagttctacgatgctcagccatgtagtgacaaagcttacaaaatagaggaactcttctattcttatgctacacatcacgataaattcactgatggtgtttgtttgttttggaattgtaacgttgatcgttacccagccaatgcaattgtgtgtaggtttgacacaagagtcttgtcaaacttgaacttaccaggctgtgatggtggtagtttgtatgtgaataagcatgcattccacactccagctttcgataaaagtgcatttactaatttaaagcaattgcctttcttttactattctgatagtccttgtgagtctcatggcaaacaagtagtgtcggatattgattatgttccactcaaatctgctacgtgtattacacgatgcaatttaggtggtgctgtttgcagacaccatgcaaatgagtaccgacagtacttggatgcatataatatgatgatttctgctggatttagcctatggatttacaaacaatttgatacttataacctgtggaatacatttaccaggttacagagtttagaaaatgtggcttataatgttgttaataaaggacactttgatggacacgccggcgaagcacctgtttccatcattaataatgctgtttacacaaaggtagatggtattgatgtggagatctttgaaaataagacaacacttcctgttaatgttgcatttgagctttgggctaagcgtaacattaaaccagtgccagagattaagatactcaataatttgggtgttgatatcgctgctaatactgtaatctgggactacaaaagagaagccccagcacatgtatctacaataggtgtctgcacaatgactgacattgccaagaaacctactgagagtgcttgttcttcacttactgtcttgtttgatggtagagtggaaggacaggtagacctttttagaaacgcccgtaatggtgttttaataacagaaggttcagtcaaaggtctaacaccttcaaagggaccagcacaagctagcgtcaatggagtcacattaattggagaatcagtaaaaacacagtttaactactttaagaaagtagacggcattattcaacagttgcctgaaacctactttactcagagcagagacttagaggattttaagcccagatcacaaatggaaactgactttctcgagctcgctatggatgaattcatacagcgatataagctcgagggctatgccttcgaacacatcgtttatggagatttcagtcatggacaacttggcggtcttcatttaatgataggcttagccaagcgctcacaagattcaccacttaaattagaggattttatccctatggacagcacagtgaaaaattacttcataacagatgcgcaaacaggttcatcaaaatgtgtgtgttctgtgattgatcttttacttgatgactttgtcgagataataaagtcacaagatttgtcagtgatttcaaaagtggtcaaggttacaattgactatgctgaaatttcattcatgctttggtgtaaggatggacatgttgaaaccttctacccaaaactacaagcaagtcaagcgtggcaaccaggtgttgcgatgcctaacttgtacaagatgcaaagaatgcttcttgaaaagtgtgaccttcagaattatggtgaaaatgctgttataccaaaaggaataatgatgaatgtcgcaaagtatactcaactgtgtcaatacttaaatacacttactttagctgtaccctacaacatgagagttattcactttggtgctggctctgataaaggagttgcaccaggtacagctgtgctcagacaatggttgccaactggcacactacttgtcgattcagatcttaatgacttcgtctccgacgcagattctactttaattggagactgtgcaacagtacatacggctaataaatgggaccttattattagcgatatgtatgaccctaggaccaaacatgtgacaaaagagaatgactctaaagaagggtttttcacttatctgtgtggatttataaagcaaaaactagccctgggtggttctatagctgtaaagataacagagcattcttggaatgctgacctttacaagcttatgggccatttctcatggtggacagcttttgttacaaatgtaaatgcatcatcatcggaagcatttttaattggggctaactatcttggcaagccgaaggaacaaattgatggctataccatgcatgctaactacattttctggaggaacacaaatcctatccagttgtcttcctattcactctttgacatgagcaaatttcctcttaaattaagaggaactgctgtaatgtctcttaaggagaatcaaatcaatgatatgatttattctcttctggaaaaaggtaggcttatcattagagaaaacaacagagttgtggtttcaagtgatattcttgttaacaactaaacgaacatgtttattttcttattatttcttactctcactagtggtagtgaccttgaccggtgcaccacttttgatgatgttcaagctcctaattacactcaacatacttcatctatgaggggggtttactatcctgatgaaatttttagatcagacactctttatttaactcaggatttatttcttccattttattctaatgttacagggtttcatactattaatcatacgtttggcaaccctgtcataccttttaaggatggtatttattttgctgccacagagaaatcaaatgttgtccgtggttgggtttttggttctaccatgaacaacaagtcacagtcggtgattattattaacaattctactaatgttgttatacgagcatgtaactttgaattgtgtgacaaccctttctttgctgtttctaaacccatgggtacacagacacatactatgatattcgataatgcatttaattgcactttcgagtacatatctgatgccttttcgcttgatgtttcagaaaagtcaggtaattttaaacacttacgagagtttgtgtttaaaaataaagatgggtttctctatgtttataagggctatcaacctatagatgtagttcgtgatctaccttctggttttaacactttgaaacctatttttaagttgcctcttggtattaacattacaaattttagagccattcttacagccttttcacctgctcaagacatttggggcacgtcagctgcagcctattttgttggctatttaaagccaactacatttatgctcaagtatgatgaaaatggtacaatcacagatgctgttgattgttctcaaaatccacttgctgaactcaaatgctctgttaagagctttgagattgacaaaggaatttaccagacctctaatttcagggttgttccctcaggagatgttgtgagattccctaatattacaaacttgtgtccttttggagaggtttttaatgctactaaattcccttctgtctatgcatgggagagaaaaaaaatttctaattgtgttgctgattactctgtgctctacaactcaacatttttttcaacctttaagtgctatggcgtttctgccactaagttgaatgatctttgcttctccaatgtctatgcagattcttttgtagtcaagggagatgatgtaagacaaatagcgccaggacaaactggtgttattgctgattataattataaattgccagatgatttcatgggttgtgtccttgcttggaatactaggaacattgatgctacttcaactggtaattataattataaatataggtatcttagacatggcaagcttaggccctttgagagagacatatctaatgtgcctttctcccctgatggcaaaccttgcaccccacctgctcttaattgttattggccattaaatgattatggtttttacaccactactggcattggctaccaaccttacagagttgtagtactttcttttgaacttttaaatgcaccggccacggtttgtggaccaaaattatccactgaccttattaagaaccagtgtgtcaattttaattttaatggactcactggtactggtgtgttaactccttcttcaaagagatttcaaccatttcaacaatttggccgtgatgtttctgatttcactgattccgttcgagatcctaaaacatctgaaatattagacatttcaccttgcgcttttgggggtgtaagtgtaattacacctggaacaaatgcttcatctgaagttgctgttctatatcaagatgttaactgcactgatgtttctacagcaattcatgcagatcaactcacaccagcttggcgcatatattctactggaaacaatgtattccagactcaagcaggctgtcttataggagctgagcatgtcgacacttcttatgagtgcgacattcctattggagctggcatttgtgctagttaccatacagtttctttattacgtagtactagccaaaaatctattgtggcttatactatgtctttaggtgctgatagttcaattgcttactctaataacaccattgctatacctactaacttttcaattagcattactacagaagtaatgcctgtttctatggctaaaacctccgtagattgtaatatgtacatctgcggagattctactgaatgtgctaatttgcttctccaatatggtagcttttgcacacaactaaatcgtgcactctcaggtattgctgctgaacaggatcgcaacacacgtgaagtgttcgctcaagtcaaacaaatgtacaaaaccccaactttgaaatattttggtggttttaatttttcacaaatattacctgaccctctaaagccaactaagaggtcttttattgaggacttgctctttaataaggtgacactcgctgatgctggcttcatgaagcaatatggcgaatgcctaggtgatattaatgctagagatctcatttgtgcgcagaagttcaatggacttacagtgttgccacctctgctcactgatgatatgattgctgcctacactgctgctctagttagtggtactgccactgctggatggacatttggtgctggcgctgctcttcaaataccttttgctatgcaaatggcatataggttcaatggcattggagttacccaaaatgttctctatgagaaccaaaaacaaatcgccaaccaatttaacaaggcgattagtcaaattcaagaatcacttacaacaacatcaactgcattgggcaagctgcaagacgttgttaaccagaatgctcaagcattaaacacacttgttaaacaacttagctctaattttggtgcaatttcaagtgtgctaaatgatatcctttcgcgacttgataaagtcgaggcggaggtacaaattgacaggttaattacaggcagacttcaaagccttcaaacctatgtaacacaacaactaatcagggctgctgaaatcagggcttctgctaatcttgctgctactaaaatgtctgagtgtgttcttggacaatcaaaaagagttgacttttgtggaaagggctaccaccttatgtccttcccacaagcagccccgcatggtgttgtcttcctacatgtcacgtatgtgccatcccaggagaggaacttcaccacagcgccagcaatttgtcatgaaggcaaagcatacttccctcgtgaaggtgtttttgtgtttaatggcacttcttggtttattacacagaggaacttcttttctccacaaataattactacagacaatacatttgtctcaggaaattgtgatgtcgttattggcatcattaacaacacagtttatgatcctctgcaacctgagcttgactcattcaaagaagagctggacaagtacttcaaaaatcatacatcaccagatgttgatcttggcgacatttcaggcattaacgcttctgtcgtcaacattcaaaaagaaattgaccgcctcaatgaggtcgctaaaaatttaaatgaatcactcattgaccttcaagaattgggaaaatatgagcaatatattaaatggccttggtatgtttggctcggcttcattgctggactaattgccatcgtcatggttacaatcttgctttgttgcatgactagttgttgcagttgcctcaagggtgcatgctcttgtggttcttgctgcaagtttgatgaggatgactctgagccagttctcaagggtgtcaaattacattacacataaacgaacttatggatttgtttatgagattttttactcttagatcaattactgcacagccagtaaaaattgacaatgcttctcctgcaagtactgttcatgctacagcaacgataccgctacaagcctcactccctttcggatggcttgttattggcgttgcatttcttgctgtttttcagagcgctaccaaaataattgcgctcaataaaagatggcagctagccctttataagggcttccagttcatttgcaatttactgctgctatttgttaccatctattcacatcttttgcttgtcgctgcaggtatggaggcgcaatttttgtacctctatgccttgatatattttctacaatgcatcaacgcatgtagaattattatgagatgttggctttgttggaagtgcaaatccaagaacccattactttatgatgccaactactttgtttgctggcacacacataactatgactactgtataccatataacagtgtcacagatacaattgtcgttactgaaggtgacggcatttcaacaccaaaactcaaagaagactaccaaattggtggttattctgaggataggcactcaggtgttaaagactatgtcgttgtacatggctatttcaccgaagtttactaccagcttgagtctacacaaattactacagacactggtattgaaaatgctacattcttcatctttaacaagcttgttaaagacccaccgaatgtgcaaatacacacaatcgacggctcttcaggagttgctaatccagcaatggatccaatttatgatgagccgacgacgactactagcgtgcctttgtaagcacaagaaagtgagtacgaacttatgtactcattcgtttcggaagaaacaggtacgttaatagttaatagcgtacttctttttcttgctttcgtggtattcttgctagtcacactagccatccttactgcgcttcgattgtgtgcgtactgctgcaatattgttaacgtgagtttagtaaaaccaacggtttacgtctactcgcgtgttaaaaatctgaactcttctgaaggagttcctgatcttctggtctaaacgaactaactattattattattctgtttggaactttaacattgcttatcatggcagacaacggtactattaccgttgaggagcttaaacaactcctggaacaatggaacctagtaataggtttcctattcctagcctggattatgttactacaatttgcctattctaatcggaacaggtttttgtacataataaagcttgttttcctctggctcttgtggccagtaacacttgcttgttttgtgcttgctgctgtctacagaattaattgggtgactggcgggattgcgattgcaatggcttgtattgtaggcttgatgtggcttagctacttcgttgcttccttcaggctgtttgctcgtacccgctcaatgtggtcattcaacccagaaacaaacattcttctcaatgtgcctctccgggggacaattgtgaccagaccgctcatggaaagtgaacttgtcattggtgctgtgatcattcgtggtcacttgcgaatggccggacactccctagggcgctgtgacattaaggacctgccaaaagagatcactgtggctacatcacgaacgctttcttattacaaattaggagcgtcgcagcgtgtaggcactgattcaggttttgctgcatacaaccgctaccgtattggaaactataaattaaatacagaccacgccggtagcaacgacaatattgctttgctagtacagtaagtgacaacagatgtttcatcttgttgacttccaggttacaatagcagagatattgattatcattatgaggactttcaggattgctatttggaatcttgacgttataataagttcaatagtgagacaattatttaagcctctaactaagaagaattattcggagttagatgatgaagaacctatggagttagattatccataaaacgaacatgaaaattattctcttcctgacattgattgtatttacatcttgcgagctatatcactatcaggagtgtgttagaggtacgactgtactactaaaagaaccttgcccatcaggaacatacgagggcaattcaccatttcaccctcttgctgacaataaatttgcactaacttgcactagcacacactttgcttttgcttgtgctgacggtactcgacatacctatcagctgcgtgcaagatcagtttcaccaaaacttttcatcagacaagaggaggttcaacaagagctctactcgccactttttctcattgttgctgctctagtatttttaatactttgcttcaccattaagagaaagacagaatgaatgagctcactttaattgacttctatttgtgctttttagcctttctgctattccttgttttaataatgcttattatattttggttttcactcgaaatccaggatctagaagaaccttgtaccaaagtctaaacgaacatgaaacttctcattgttttgacttgtatttctctatgcagttgcatatgcactgtagtacagcgctgtgcatctaataaacctcatgtgcttgaagatccttgtaaggtacaacactaggggtaatacttatagcactgcttggctttgtgctctaggaaaggttttaccttttcatagatggcacactatggttcaaacatgcacacctaatgttactatcaactgtcaagatccagctggtggtgcgcttatagctaggtgttggtaccttcatgaaggtcaccaaactgctgcatttagagacgtacttgttgttttaaataaacgaacaaattaaaatgtctgataatggaccccaatcaaaccaacgtagtgccccccgcattacatttggtggacccacagattcaactgacaataaccagaatggaggacgcaatggggcaaggccaaaacagcgccgaccccaaggtttacccaataatactgcgtcttggttcacagctctcactcagcatggcaaggaggaacttagattccctcgaggccagggcgttccaatcaacaccaatagtggtccagatgaccaaattggctactaccgaagagctacccgacgagttcgtggtggtgacggcaaaatgaaagagctcagccccagatggtacttctattacctaggaactggcccagaagcttcacttccctacggcgctaacaaagaaggcatcgtatgggttgcaactgagggagccttgaatacacccaaagaccacattggcacccgcaatcctaataacaatgctgccaccgtgctacaacttcctcaaggaacaacattgccaaaaggcttctacgcagagggaagcagaggcggcagtcaagcctcttctcgctcctcatcacgtagtcgcggtaattcaagaaattcaactcctggcagcagtaggggaaattctcctgctcgaatggctagcggaggtggtgaaactgccctcgcgctattgctgctagacagattgaaccagcttgagagcaaagtttctggtaaaggccaacaacaacaaggccaaactgtcactaagaaatctgctgctgaggcatctaaaaagcctcgccaaaaacgtactgccacaaaacagtacaacgtcactcaagcatttgggagacgtggtccagaacaaacccaaggaaatttcggggaccaagacctaatcagacaaggaactgattacaaacattggccgcaaattgcacaatttgctccaagtgcctctgcattctttggaatgtcacgcattggcatggaagtcacaccttcgggaacatggctgacttatcatggagccattaaattggatgacaaagatccacaattcaaagacaacgtcatactgctgaacaagcacattgacgcatacaaaacattcccaccaacagagcctaaaaaggacaaaaagaaaaagactgatgaagctcagcctttgccgcagagacaaaagaagcagcccactgtgactcttcttcctgcggctgacatggatgatttctccagacaacttcaaaattccatgagtggagcttctgctgattcaactcaggcataaacactcatgatgaccacacaaggcagatgggctatgtaaacgttttcgcaattccgtttacgatacatagtctactcttgtgcagaatgaattctcgtaactaaacagcacaagtaggtttagttaactttaatctcacatagcaatctttaatcaatgtgtaacattagggaggacttgaaagagccaccacattttcatcgaggccacgcggagtacgatcgagggtacagtgaataatgctagggagagctgcctatatggaagagccctaatgtgtaaaattaattttagtagtgctatccccatgtgattttaatagcttcttaggagaatgacaaaaaaaaaaaaaaaaaaaaaaaa

SEQ ID NO: 238196 - DNA, 29727 bp, SARS Virus
atattaggtttttacctacccaggaaaagccaaccaacctcgatctcttgtagatctgttctctaaacgaactttaaaatctgtgtagctgtcgctcggctgcatgcctagtgcacctacgcagtataaacaataataaattttactgtcgttgacaagaaacgagtaactcgtccctcttctgcagactgcttacggtttcgtccgtgttgcagtcgatcatcagcatacctaggtttcgtccgggtgtgaccgaaaggtaagatggagagccttgttcttggtgtcaacgagaaaacacacgtccaactcagtttgcctgtccttcaggttagagacgtgctagtgcgtggcttcggggactctgtggaagaggccctatcggaggcacgtgaacacctcaaaaatggcacttgtggtctagtagagctggaaaaaggcgtactgccccagcttgaacagccctatgtgttcattaaacgttctgatgccttaagcaccaatcacggccacaaggtcgttgagctggttgcagaaatggacggcattcagtacggtcgtagcggtataacactgggagtactcgtgccacatgtgggcgaaaccccaattgcataccgcaatgttcttcttcgtaagaacggtaataagggagccggtggtcatagctatggcatcgatctaaagtcttatgacttaggtgacgagcttggcactgatcccattgaagattatgaacaaaactggaacactaagcatggcagtggtgcactccgtgaactcactcgtgagctcaatggaggtgcagtcactcgctatgtcgacaacaatttctgtggcccagatgggtaccctcttgattgcatcaaagattttctcgcacgcgcgggcaagtcaatgtgcactctttccgaacaacttgattacatcgagtcgaagagaggtgtctactgctgccgtgaccatgagcatgaaattgcctggttcactgagcgctctgataagagctacgagcaccagacacccttcgaaattaagagtgccaagaaatttgacactttcaaaggggaatgcccaaagtttgtgtttcctcttaactcaaaagtcaaagtcattcaaccacgtgttgaaaagaaaaagactgagggtttcatggggcgtatacgctctgtgtaccctgttgcatctccacaggagtgtaacaatatgcacttgtctaccttgatgaaatgtaatcattgcgatgaagtttcatggcagacgtgcgactttctgaaagccacttgtgaacattgtggcactgaaaatttagttattgaaggacctactacatgtgggtacctacctactaatgctgtagtgaaaatgccatgtcctgcctgtcaagacccagagattggacctgagcatagtgttgcagattatcacaaccactcaaacattgaaactcgactccgcaagggaggtaggactagatgttttggaggctgtgtgtttgcctatgttggctgctataataagcgtgcctactgggttcctcgtgctagtgctgatattggctcaggccatactggcattactggtgacaatgtggagaccttgaatgaggatctccttgagatactgagtcgtgaacgtgttaacattaacattgttggcgattttcatttgaatgaagaggttgccatcattttggcatctttctctgcttctacaagtgcctttattgacactataaagagtcttgattacaagtctttcaaaaccattgttgagtcctgcggtaactataaagttaccaagggaaagcccgtaaaaggtgcttggaacattggacaacagagatcagttttaacaccactgtgtggttttccctcacaggctgctggtgttatcagatcaatttttgcgcgcacacttgatgcagcaaaccactcaattcctgatttgcaaagagcagctgtcaccatacttgatggtatttctgaacagtcattacgtcttgtcgacgccatggtttatacttcagacctgctcaccaacagtgtcattattatggcatatgtaactggtggtcttgtacaacagacttctcagtggttgtctaatcttttgggcactactgttgaaaaactcaggcctatctttgaatggattgaggcgaaacttagtgcaggagttgaatttctcaaggatgcttgggagattctcaaatttctcattacaggtgtttttgacatcgtcaagggtcaaatacaggttgcttcagataacatcaaggattgtgtaaaatgcttcattgatgttgttaacaaggcactcgaaatgtgcattgatcaagtcactatcgctggcgcaaagttgcgatcactcaacttaggtgaagtcttcatcgctcaaagcaagggactttaccgtcagtgtatacgtggcaaggagcagctgcaactactcatgcctcttaaggcaccaaaagaagtaacctttcttgaaggtgattcacatgacacagtacttacctctgaggaggttgttctcaagaacggtgaactcgaagcactcgagacgcccgttgatagcttcacaaatggagctatcgttggcacaccagtctgtgtaaatggcctcatgctcttagagattaaggacaaagaacaatactgcgcattgtctcctggtttactggctacaaacaatgtctttcgcttaaaagggggtgcaccaattaaaggtgtaacctttggagaagatactgtttgggaagttcaaggttacaagaatgtgagaatcacatttgagcttgatgaacgtgttgacaaagtgcttaatgaaaagtgctctgtctacactgttgaatccggtaccgaagttactgagtttgcatgtgttgtagcagaggctgttgtgaagactttacaaccagtttctgatctccttaccaacatgggtattgatcttgatgagtggagtgtagctacattctacttatttgatgatgctggtgaagaaaacttttcatcacgtatgtattgttccttttaccctccagatgaggaagaagaggacgatgcagagtgtgaggaagaagaaattgatgaaacctgtgaacatgagtacggtacagaggatgattatcaaggtctccctctggaatttggtgcctcagctgaaacagttcgagttgaggaagaagaagaggaagactggctggatgatactactgagcaatcagagattgagccagaaccagaacctacacctgaagaaccagttaatcagtttactggttatttaaaacttactgacaatgttgccattaaatgtgttgacatcgttaaggaggcacaaagtgctaatcctatggtgattgtaaatgctgctaacatacacctgaaacatggtggtggtgtagcaggtgcactcaacaaggcaaccaatggtgccatgcaaaaggagagtgatgattacattaagctaaatggccctcttacagtaggagggtcttgtttgctttctggacataatcttgctaagaagtgtctgcatgttgttggacctaacctaaatgcaggtgaggacatccagcttcttaaggcagcatatgaaaatttcaattcacaggacatcttacttgcaccattgttgtcagcaggcatatttggtgctaaaccacttcagtctttacaagtgtgcgtgcagacggttcgtacacaggtttatattgcagtcaatgacaaagctctttatgagcaggttgtcatggattatcttgataacctgaagcctagagtggaagcacctaaacaagaggagccaccaaacacagaagattccaaaactgaggagaaatctgtcgtacagaagcctgtcgatgtgaagccaaaaattaaggcctgcattgatgaggttaccacaacactggaagaaactaagtttcttaccaataagttactcttgtttgctgatatcaatggtaagctttaccatgattctcagaacatgcttagaggtgaagatatgtctttccttgagaaggatgcaccttacatggtaggtgatgttatcactagtggtgatatcacttgtgttgtaataccctccaaaaaggctggtggcactactgagatgctctcaagagctttgaagaaagtgccagttgatgagtatataaccacgtaccctggacaaggatgtgctggttatacacttgaggaagctaagactgctcttaagaaatgcaaatctgcattttatgtactaccttcagaagcacctaatgctaaggaagagattctaggaactgtatcctggaatttgagagaaatgcttgctcatgctgaagagacaagaaaattaatgcctatatgcatggatgttagagccataatggcaaccatccaacgtaagtataaaggaattaaaattcaagagggcatcgttgactatggtgtccgattcttcttttatactagtaaagagcctgtagcttctattattacgaagctgaactctctaaatgagccgcttgtcacaatgccaattggttatgtgacacatggttttaatcttgaagaggctgcgcgctgtatgcgttctcttaaagctcctgccgtagtgtcagtatcatcaccagatgctgttactacatataatggatacctcacttcgtcatcaaagacatctgaggagcactttgtagaaacagtttctttggctggctcttacagagattggtcctattcaggacagcgtacagagttaggtgttgaatttcttaagcgtggtgacaaaattgtgtaccacactctggagagccccgtcgagtttcatcttgacggtgaggttctttcacttgacaaactaaagagtctcttatccctgcgggaggttaagactataaaagtgttcacaactgtggacaacactaatctccacacacagcttgtggatatgtctatgacatatggacagcagtttggtccaacatacttggatggtgctgatgttacaaaaattaaacctcatgtaaatcatgagggtaagactttctttgtactacctagtgatgacacactacgtagtgaagctttcgagtactaccatactcttgatgagagttttcttggtaggtacatgtctgctttaaaccacacaaagaaatggaaatttcctcaagttggtggtttaacttcaattaaatgggctgataacaattgttatttgtctagtgttttattagcacttcaacagcttgaagtcaaattcaatgcaccagcacttcaagaggcttattatagagcccgtgctggtgatgctgctaacttttgtgcactcatactcgcttacagtaataaaactgttggcgagcttggtgatgtcagagaaactatgacccatcttctacagcatgctaatttggaatctgcaaagcgagttcttaatgtggtgtgtaaacattgtggtcagaaaactactaccttaacgggtgtagaagctgtgatgtatatgggtactctatcttatgataatcttaagacaggtgtttccattccatgtgtgtgtggtcgtgatgctacacaatatctagtacaacaagagtcttcttttgttatgatgtctgcaccacctgctgagtataaattacagcaaggtacattcttatgtgcgaatgagtacactggtaactatcagtgtggtcattacactcatataactgctaaggagaccctctatcgtattgacggagctcaccttacaaagatgtcagagtacaaaggaccagtgactgatgttttctacaaggaaacatcttacactacaaccatcaagcctgtgtcgtataaactcgatggagttacttacacagagattgaaccaaaattggatgggtattataaaaaggataatgcttactatacagagcagcctatagaccttgtaccaactcaaccattaccaaatgcgagttttgataatttcaaactcacatgttctaacacaaaatttgctgatgatttaaatcaaatgacaggcttcacaaagccagcttcacgagagctatctgtcacattcttcccagacttgaatggcgatgtagtggctattgactatagacactattcagcgagtttcaagaaaggtgctaaattactgcataagccaattgtttggcacattaaccaggctacaaccaagacaacgttcaaaccaaacacttggtgtttacgttgtctttggagtacaaagccagtagatacttcaaattcatttgaagttctggcagtagaagacacacaaggaatggacaatcttgcttgtgaaagtcaacaacccacctctgaagaagtagtggaaaatcctaccatacagaaggaagtcatagagtgtgacgtgaaaactaccgaagttgtaggcaatgtcatacttaaaccatcagatgaaggtgttaaagtaacacaagagttaggtcatgaggatcttatggctgcttatgtggaaaacacaagcattaccattaagaaacctaatgagctttcactagccttaggtttaaaaacaattgccactcatggtattgctgcaattaatagtgttccttggagtaaaattttggcttatgtcaaaccattcttaggacaagcagcaattacaacatcaaattgcgctaagagattagcacaacgtgtgtttaacaattatatgccttatgtgtttacattattgttccaattgtgtacttttactaaaagtaccaattctagaattagagcttcactacctacaactattgctaaaaatagtgttaagagtgttgctaaattatgtttggatgccggcattaattatgtgaagtcacccaaattttctaaattgttcacaatcgctatgtggctattgttgttaagtatttgcttaggttctctaatctgtgtaactgctgcttttggtgtactcttatctaattttggtgctccttcttattgtaatggcgttagagaattgtatcttaattcgtctaacgttactactatggatttctgtgaaggttcttttccttgcagcatttgtttaagtggattagactcccttgattcttatccagctcttgaaaccattcaggtgacgatttcatcgtacaagctagacttgacaattttaggtctggccgctgagtgggttttggcatatatgttgttcacaaaattcttttatttattaggtctttcagctataatgcaggtgttctttggctattttgctagtcatttcatcagcaattcttggctcatgtggtttatcattagtattgtacaaatggcacccgtttctgcaatggttaggatgtacatcttctttgcttctttctactacatatggaagagctatgttcatatcatggatggttgcacctcttcgacttgcatgatgtgctataagcgcaatcgtgccacacgcgttgagtgtacaactattgttaatggcatgaagagatctttctatgtctatgcaaatggaggccgtggcttctgcaagactcacaattggaattgtctcaattgtgacacattttgcactggtagtacattcattagtgatgaagttgctcgtgatttgtcactccagtttaaaagaccaatcaaccctactgaccagtcatcgtatattgttgatagtgttgctgtgaaaaatggcgcgcttcacctctactttgacaaggctggtcaaaagacctatgagagacatccgctctcccattttgtcaatttagacaatttgagagctaacaacactaaaggttcactgcctattaatgtcatagtttttgatggcaagtccaaatgcgacgagtctgcttctaagtctgcttctgtgtactacagtcagctgatgtgccaacctattctgttgcttgaccaagttcttgtatcagacgttggagatagtactgaagtttccgttaagatgtttgatgcttatgtcgacaccttttcagcaacttttagtgttcctatggaaaaacttaaggcacttgttgctacagctcacagcgagttagcaaagggtgtagctttagatggtgtcctttctacattcgtgtcagctgcccgacaaggtgttgttgataccgatgttgacacaaaggatgttattgaatgtctcaaactttcacatcactctgacttagaagtgacaggtgacagttgtaacaatttcatgctcacctataataaggttgaaaacatgacgcccagagatcttggcgcatgtattgactgtaatgcaaggcatatcaatgcccaagtagcaaaaagtcacaatgtttcactcatctggaatgtaaaagactacatgtctttatctgaacagctgcgtaaacaaattcgtagtgctgccaagaagaacaacataccttttagactaacttgtgctacaactagacaggttgtcaatgtcataactactaaaatctcactcaagggtggtaagattgttagtacttgttttaaacttatgcttaaggccacattattgtgcgttcttgctgcattggtttgttatatcgttatgccagtacatacattgtcaatccatgatggttacacaaatgaaatcattggttacaaagccattcaggatggtgtcactcgtgacatcatttctactgatgattgttttgcaaataaacatgctggttttgacgcatggtttagccagcgtggtggttcatacaaaaatgacaaaagctgccctgtagtagctgctatcattacaagagagattggtttcatagtgcctggcttaccgggtactgtgctgagagcaatcaatggtgacttcttgcattttctacctcgtgtttttagtgctgttggcaacatttgctacacaccttccaaactcattgagtatagtgattttgctacctctgcttgcgttcttgctgctgagtgtacaatttttaaggatgctatgggcaaacctgtgccatattgttatgacactaatttgctagagggttctatttcttatagtgagcttcgtccagacactcgttatgtgcttatggatggttccatcatacagtttcctaacacttacctggagggttctgttagagtagtaacaacttttgatgctgagtactgtagacatggtacatgcgaaaggtcagaagtaggtatttgcctatctaccagtggtagatgggttcttaataatgagcattacagagctctatcaggagttttctgtggtgttgatgcgatgaatctcatagctaacatctttactcctcttgtgcaacctgtgggtgctttagatgtgtctgcttcagtagtggctggtggtattattgccatattggtgacttgtgctgcctactactttatgaaattcagacgtgtttttggtgagtacaaccatgttgttgctgctaatgcacttttgtttttgatgtctttcactatactctgtctggtaccagcttacagctttctgccgggagtctactcagtcttttacttgtacttgacattctatttcaccaatgatgtttcattcttggctcaccttcaatggtttgccatgttttctcctattgtgcctttttggataacagcaatctatgtattctgtatttctctgaagcactgccattggttctttaacaactatcttaggaaaagagtcatgtttaatggagttacatttagtaccttcgaggaggctgctttgtgtacctttttgctcaacaaggaaatgtacctaaaattgcgtagcgagacactgttgccacttacacagtataacaggtatcttgctctatataacaagtacaagtatttcagtggagccttagatactaccagctatcgtgaagcagcttgctgccacttagcaaaggctctaaatgactttagcaactcaggtgctgatgttctctaccaaccaccacagacatcaatcacttctgctgttctgcagagtggttttaggaaaatggcattcccgtcaggcaaagttgaagggtgcatggtacaagtaacctgtggaactacaactcttaatggattgtggttggatgacacagtatactgtccaagacatgtcatttgcacagcagaagacatgcttaatcctaactatgaagatctgctcattcgcaaatccaaccatagctttcttgttcaggctggcaatgttcaacttcgtgttattggccattctatgcaaaattgtctgcttaggcttaaagttgatacttctaaccctaagacacccaagtataaatttgtccgtatccaacctggtcaaacattttcagttctagcatgctacaatggttcaccatctggtgtttatcagtgtgccatgagacctaatcataccattaaaggttctttccttaatggatcatgtggtagtgttggttttaacattgattatgattgcgtgtctttctgctatatgcatcatatggagcttccaacaggagtacacgctggtactgacttagaaggtaaattctatggtccatttgttgacagacaaactgcacaggctgcaggtacagacacaaccataacattaaatgttttggcatggctgtatgctgctgttatcaatggtgataggtggtttcttaatagattcaccactactttgaatgactttaaccttgtggcaatgaagtacaactatgaacctttgacacaagatcatgttgacatattgggacctctttctgctcaaacaggaattgccgtcttagatatgtgtgctgctttgaaagagctgctgcagaatggtatgaatggtcgtactatccttggtagcactattttagaagatgagtttacaccatttgatgttgttagacaatgctctggtgttaccttccaaggtaagttcaagaaaattgttaagggcactcatcattggatgcttttaactttcttgacatcactattgattcttgttcaaagtacacagtggtcactgtttttctttgtttacgagaatgctttcttgccatttactcttggtattatggcaattgctgcatgtgctatgctgcttgttaagcataagcacgcattcttgtgcttgtttctgttaccttctcttgcaacagttgcttactttaatatggtctacatgcctgctagctgggtgatgcgtatcatgacatggcttgaattggctgacactagcttgtctggttataggcttaaggattgtgttatgtatgcttcagctttagttttgcttattctcatgacagctcgcactgtttatgatgatgctgctagacgtgtttggacactgatgaatgtcattacacttgtttacaaagtctactatggtaatgctttagatcaagctatttccatgtgggccttagttatttctgtaacctctaactattctggtgtcgttacgactatcatgtttttagctagagctatagtgtttgtgtgtgttgagtattacccattgttatttattactggcaacaccttacagtgtatcatgcttgtttattgtttcttaggctattgttgctgctgctactttggccttttctgtttactcaaccgttacttcaggcttactcttggtgtttatgactacttggtctctacacaagaatttaggtatatgaactcccaggggcttttgcctcctaagagtagtattgatgctttcaagcttaacattaagttgttgggtattggaggtaaaccatgtatcaaggttgctactgtacagtctaaaatgtctgacgtaaagtgcacatctgtggtactgctctcggttcttcaacaacttagagtagagtcatcttctaaattgtgggcacaatgtgtacaactccacaatgatattcttcttgcaaaagacacaactgaagctttcgagaagatggtttctcttttgtctgttttgctatccatgcagggtgctgtagacattaataggttgtgcgaggaaatgctcgataaccgtgctactcttcaggctattgcttcagaatttagttctttaccatcatatgccgcttatgccactgcccaggaggcctatgagcaggctgtagctaatggtgattctgaagtcgttctcaaaaagttaaagaaatctttgaatgtggctaaatctgagtttgaccgtgatgctgccatgcaacgcaagttggaaaagatggcagatcaggctatgacccaaatgtacaaacaggcaagatctgaggacaagagggcaaaagtaactagtgctatgcaaacaatgctcttcactatgcttaggaagcttgataatgatgcacttaacaacattatcaacaatgcgcgtgatggttgtgttccactcaacatcataccattgactacagcagccaaactcatggttgttgtccctgattatggtacctacaagaacacttgtgatggtaacacctttacatatgcatctgcactctgggaaatccagcaagttgttgatgcggatagcaagattgttcaacttagtgaaattaacatggacaattcaccaaatttggcttggcctcttattgttacagctctaagagccaactcagctgttaaactacagaataatgaactgagtccagtagcactacgacagatgtcctgtgcggctggtaccacacaaacagcttgtactgatgacaatgcacttgcctactataacaattcgaagggaggtaggtttgtgctggcattactatcagaccaccaagatctcaaatgggctagattccctaagagtgatggtacaggtacaatttacacagaactggaaccaccttgtaggtttgttacagacacaccaaaagggcctaaagtgaaatacttgtacttcatcaaaggcttaaacaacctaaatagaggtatggtgctgggcagtttagctgctacagtacgtcttcaggctggaaatgctacagaagtacctgccaattcaactgtgctttccttctgtgcttttgcagtagaccctgctaaagcatataaggattacctagcaagtggaggacaaccaatcaccaactgtgtgaagatgttgtgtacacacactggtacaggacaggcaattactgtaacaccagaagctaacatggaccaagagtcctttggtggtgcttcatgttgtctgtattgtagatgccacattgaccatccaaatcctaaaggattctgtgacttgaaaggtaagtacgtccaaatacctaccacttgtgctaatgacccagtgggttttacacttagaaacacagtctgtaccgtctgcggaatgtggaaaggttatggctgtagttgtgaccaactccgcgaacccttgatgcagtctgcggatgcatcaacgtttttaaacgggtttgcggtgtaagtgcagcccgtcttacaccgtgcggcacaggcactagtactgatgtcgtctacagggcttttgatatttacaacgaaaaagttgctggttttgcaaagttcctaaaaactaattgctgtcgcttccaggagaaggatgaggaaggcaatttattagactcttactttgtagttaagaggcatactatgtctaactaccaacatgaagagactatttataacttggttaaagattgtccagcggttgctgtccatgactttttcaagtttagagtagatggtgacatggtaccacatatatcacgtcagcgtctaactaaatacacaatggctgatttagtctatgctctacgtcattttgatgagggtaattgtgatacattaaaagaaatactcgtcacatacaattgctgtgatgatgattatttcaataagaaggattggtatgacttcgtagagaatcctgacatcttacgcgtatatgctaacttaggtgagcgtgtacgccaatcattattaaagactgtacaattctgcgatgctatgcgtgatgcaggcattgtaggcgtactgacattagataatcaggatcttaatgggaactggtacgatttcggtgatttcgtacaagtagcaccaggctgcggagttcctattgtggattcatattactcattgctgatgcccatcctcactttgactagggcattggctgctgagtcccatatggatgctgatctcgcaaaaccacttattaagtgggatttgctgaaatatgattttacggaagagagactttgtctcttcgaccgttattttaaatattgggaccagacataccatcccaattgtattaactgtttggatgataggtgtatccttcattgtgcaaactttaatgtgttattttctactgtgtttccacctacaagttttggaccactagtaagaaaaatatttgtagatggtgttccttttgttgtttcaactggataccattttcgtgagttaggagtcgtacataatcaggatgtaaacttacatagctcgcgtctcagtttcaaggaacttttagtgtatgctgctgatccagctatgcatgcagcttctggcaatttattgctagataaacgcactacatgcttttcagtagctgcactaacaaacaatgttgcttttcaaactgtcaaacccggtaattttaataaagacttttatgactttgctgtgtctaaaggtttctttaaggaaggaagttctgttgaactaaaacacttcttctttgctcaggatggcaacgctgctatcagtgattatgactattatcgttataatctgccaacaatgtgtgatatcagacaactcctattcgtagttgaagttgttgataaatactttgattgttacgatggtggctgtattaatgccaaccaagtaatcgttaacaatctggataaatcagctggtttcccatttaataaatggggtaaggctagactttattatgactcaatgagttatgaggatcaagatgcacttttcgcgtatactaagcgtaatgtcatccctactataactcaaatgaatcttaagtatgccattagtgcaaagaatagagctcgcaccgtagctggtgtctctatctgtagtactatgacaaatagacagtttcatcagaaattattgaagtcaatagccgccactagaggagctactgtggtaattggaacaagcaagttttacggtggctggcataatatgttaaaaactgtttacagtgatgtagaaactccacaccttatgggttgggattatccaaaatgtgacagagccatgcctaacatgcttaggataatggcctctcttgttcttgctcgcaaacataacacttgctgtaacttatcacaccgtttctacaggttagctaacgagtgtgcgcaagtattaagtgagatggtcatgtgtggcggctcactatatgttaaaccaggtggaacatcatccggtgatgctacaactgcttatgctaatagtgtctttaacatttgtcaagctgttacagccaatgtaaatgcacttctttcaactgatggtaataagatagctgacaagtatgtccgcaatctacaacacaggctctatgagtgtctctatagaaatagggatgttgatcatgaattcgtggatgagttttacgcttacctgcgtaaacatttctccatgatgattctttctgatgatgccgttgtgtgctataacagtaactatgcggctcaaggtttagtagctagcattaagaactttaaggcagttctttattatcaaaataatgtgttcatgtctgaggcaaaatgttggactgagactgaccttactaaaggacctcacgaattttgctcacagcatacaatgctagttaaacaaggagatgattacgtgtacctgccttacccagatccatcaagaatattaggcgcaggctgttttgtcgatgatattgtcaaaacagatggtacacttatgattgaaaggttcgtgtcactggctattgatgcttacccacttacaaaacatcctaatcaggagtatgctgatgtctttcacttgtatttacaatacattagaaagttacatgatgagcttactggccacatgttggacatgtattccgtaatgctaactaatgataacacctcacggtactgggaacctgagttttatgaggctatgtacacaccacatacagtcttgcaggctgtaggtgcttgtgtattgtgcaattcacagacttcacttcgttgcggtgcctgtattaggagaccattcctatgttgcaagtgctgctatgaccatgtcatttcaacatcacacaaattagtgttgtctgttaatccctatgtttgcaatgccccaggttgtgatgtcactgatgtgacacaactgtatctaggaggtatgagctattattgcaagtcacataagcctcccattagttttccattatgtgctaatggtcaggtttttggtttatacaaaaacacatgtgtaggcagtgacaatgtcactgacttcaatgcgatagcaacatgtgattggactaatgctggcgattacatacttgccaacacttgtactgagagactcaagcttttcgcagcagaaacgctcaaagccactgaggaaacatttaagctgtcatatggtattgctactgtacgcgaagtactctctgacagagaattgcatctttcatgggaggttggaaaacctagaccaccattgaacagaaactatgtctttactggttaccgtgtaactaaaaatagtaaagtacagattggagagtacacctttgaaaaaggtgactatggtgatgctgttgtgtacagaggtactacgacatacaagttgaatgttggtgattactttgtgttgacatctcacactgtaatgccacttagtgcacctactctagtgccacaagagcactatgtgagaattactggcttgtacccaacactcaacatctcagatgagttttctagcaatgttgcaaattatcaaaaggtcggcatgcaaaagtactctacactccaaggaccacctggtactggtaagagtcattttgccatcggacttgctctctattacccatctgctcgcatagtgtatacggcatgctctcatgcagctgttgatgccctatgtgaaaaggcattaaaatatttgcccatagataaatgtagtagaatcatacctgcgcgtgcgcgcgtagagtgttttgataaattcaaagtgaattcaacactagaacagtatgttttctgcactgtaaatgcattgccagaaacaactgctgacattgtagtctttgatgaaatctctatggctactaattatgacttgagtgttgtcaatgctagacttcgtgcaaaacactacgtctatattggcgatcctgctcaattaccagccccccgcacattgctgactaaaggcacactagaaccagaatattttaattcagtgtgcagacttatgaaaacaataggtccagacatgttccttggaacttgtcgccgttgtcctgctgaaattgttgacactgtgagtgctttagtttatgacaataagctaaaagcacacaaggataagtcagctcaatgcttcaaaatgttctacaaaggtgttattacacatgatgtttcatctgcaatcaacagacctcaaataggcgttgtaagagaatttcttacacgcaatcctgcttggagaaaagctgtttttatctcaccttataattcacagaacgctgtagcttcaaaaatcttaggattgcctacgcagactgttgattcatcacagggttctgaatatgactatgtcatattcacacaaactactgaaacagcacactcttgtaatgtcaaccgcttcaatgtggctatcacaagggcaaaaattggcattttgtgcataatgtctgatagagatctttatgacaaactgcaatttacaagtctagaaataccacgtcgcaatgtggctacattacaagcagaaaatgtaactggactttttaaggactgtagtaagatcattactggtcttcatcctacacaggcacctacacacctcagcgttgatataaagttcaagactgaaggattatgtgttgacataccaggcataccaaaggacatgacctaccgtagactcatctctatgatgggtttcaaaatgaattaccaagtcaatggttaccctaatatgtttatcacccgcgaagaagctattcgtcacgttcgtgcgtggattggctttgatgtagagggctgtcatgcaactagagatgctgtgggtactaacctacctctccagctaggattttctacaggtgttaacttagtagctgtaccgactggttatgttgacactgaaaataacacagaattcaccagagttaatgcaaaacctccaccaggtgaccagtttaaacatcttataccactcatgtataaaggcttgccctggaatgtagtgcgtattaagatagtacaaatgctcagtgatacactgaaaggattgtcagacagagtcgtgttcgtcctttgggcgcatggctttgagcttacatcaatgaagtactttgtcaagattggacctgaaagaacgtgttgtctgtgtgacaaacgtgcaacttgcttttctacttcatcagatacttatgcctgctggaatcattctgtgggttttgactatgtctataacccatttatgattgatgttcagcagtggggctttacgggtaaccttcagagtaaccatgaccaacattgccaggtacatggaaatgcacatgtggctagttgtgatgctatcatgactagatgtttagcagtccatgagtgctttgttaagcgcgttgattggtctgttgaataccctattataggagatgaactgagggttaattctgcttgcagaaaagtacaacacatggttgtgaagtctgcattgcttgctgataagtttccagttcttcatgacattggaaatccaaaggctatcaagtgtgtgcctcaggctgaagtagaatggaagttctacgatgctcagccatgtagtgacaaagcttacaaaatagaggagctcttctattcttatgctacacatcacgataaattcactgatggtgtttgtttgttttggaattgtaacgttgatcgttacccagccaatgcaattgtgtgtaggtttgacacaagagtcttgtcaaacttgaacttaccaggctgtgatggtggtagtttgtatgtgaataagcatgcattccacactccagctttcgataaaagtgcatttactaatttaaagcaattgcctttcttttactattctgatagtccttgtgagtctcatggcaaacaagtagtgtcggatattgattatgttccactcaaatctgctacgtgtattacacgatgcaatttaggtggtgctgtttgcagacaccatgcaaatgagtaccgacagtacttggatgcatataatatgatgatttctgctggatttagcctatggatttacaaacaatttgatacttataacctgtggaatacatttaccaggttacagagtttagaaaatgtggcttataatgttgttaataaaggacactttgatggacacgccggcgaagcacctgtttccatcattaataatgctgtttacacaaaggtagatggtattgatgtggagatctttgaaaataagacaacacttcctgttaatgttgcatttgagctttgggctaagcgtaacattaaaccagtgccagagattaagatactcaataatttgggtgttgatatcgctgctaatactgtaatctgggactacaaaagagaagccccagcacatgtatctacaataggtgtctgcacaatgactgacattgccaagaaacctactgagagtgcttgttcttcacttactgtcttgtttgatggtagagtggaaggacaggtagacctttttagaaacgcccgtaatggtgttttaataacagaaggttcagtcaaaggtctaacaccttcaaagggaccagcacaagctagcgtcaatggagtcacattaattggagaatcagtaaaaacacagtttaactactttaagaaagtagacggcattattcaacagttgcctgaaacctactttactcagagcagagacttagaggattttaagcccagatcacaaatggaaactgactttctcgagctcgctatggatgaattcatacagcgatataagctcgagggctatgccttcgaacacatcgtttatggagatttcagtcatggacaacttggcggtcttcatttaatgataggcttagccaagcgctcacaagattcaccacttaaattagaggattttatccctatggacagcacagtgaaaaattacttcataacagatgcgcaaacaggttcatcaaaatgtgtgtgttctgtgattgatcttttacttgatgactttgtcgagataataaagtcacaagatttgtcagtgatttcaaaagtggtcaaggttacaattgactatgctgaaatttcattcatgctttggtgtaaggatggacatgttgaaaccttctacccaaaactacaagcaagtcaagcgtggcaaccaggtgttgcgatgcctaacttgtacaagatgcaaagaatgcttcttgaaaagtgtgaccttcagaattatggtgaaaatgctgttataccaaaaggaataatgatgaatgtcgcaaagtatactcaactgtgtcaatacttaaatacacttactttagctgtaccctacaacatgagagttattcactttggtgctggctctgataaaggagttgcaccaggtacagctgtgctcagacaatggttgccaactggcacactacttgtcgattcagatcttaatgacttcgtctccgacgcagattctactttaattggagactgtgcaacagtacatacggctaataaatgggaccttattattagcgatatgtatgaccctaggaccaaacatgtgacaaaagagaatgactctaaagaagggtttttcacttatctgtgtggatttataaagcaaaaactagccctgggtggttctatagctgtaaagataacagagcattcttggaatgctgacctttacaagcttatgggccatttctcatggtggacagcttttgttacaaatgtaaatgcatcatcatcggaagcatttttaattggggctaactatcttggcaagccgaaggaacaaattgatggctataccatgcatgctaactacattttctggaggaacacaaatcctatccagttgtcttcctattcactctttgacatgagcaaatttcctcttaaattaagaggaactgctgtaatgtctcttaaggagaatcaaatcaatgatatgatttattctcttctggaaaaaggtaggcttatcattagagaaaacaacagagttgtggtttcaagtgatattcttgttaacaactaaacgaacatgtttattttcttattatttcttactctcactagtggtagtgaccttgaccggtgcaccacttttgatgatgttcaagctcctaattacactcaacatacttcatctatgaggggggtttactatcctgatgaaatttttagatcagacactctttatttaactcaggatttatttcttccattttattctaatgttacagggtttcatactattaatcatacgtttggcaaccctgtcataccttttaaggatggtatttattttgctgccacagagaaatcaaatgttgtccgtggttgggtttttggttctaccatgaacaacaagtcacagtcggtgattattattaacaattctactaatgttgttatacgagcatgtaactttgaattgtgtgacaaccctttctttgctgtttctaaacccatgggtacacagacacatactatgatattcgataatgcatttaattgcactttcgagtacatatctgatgccttttcgcttgatgtttcagaaaagtcaggtaattttaaacacttacgagagtttgtgtttaaaaataaagatgggtttctctatgtttataagggctatcaacctatagatgtagttcgtgatctaccttctggttttaacactttgaaacctatttttaagttgcctcttggtattaacattacaaattttagagccattcttacagccttttcacctgctcaagacatttggggcacgtcagctgcagcctattttgttggctatttaaagccaactacatttatgctcaagtatgatgaaaatggtacaatcacagatgctgttgattgttctcaaaatccacttgctgaactcaaatgctctgttaagagctttgagattgacaaaggaatttaccagacctctaatttcagggttgttccctcaggagatgttgtgagattccctaatattacaaacttgtgtccttttggagaggtttttaatgctactaaattcccttctgtctatgcatgggagagaaaaaaaatttctaattgtgttgctgattactctgtgctctacaactcaacatttttttcaacctttaagtgctatggcgtttctgccactaagttgaatgatctttgcttctccaatgtctatgcagattcttttgtagtcaagggagatgatgtaagacaaatagcgccaggacaaactggtgttattgctgattataattataaattgccagatgatttcatgggttgtgtccttgcttggaatactaggaacattgatgctacttcaactggtaattataattataaatataggtatcttagacatggcaagcttaggccctttgagagagacatatctaatgtgcctttctcccctgatggcaaaccttgcaccccacctgctcttaattgttattggccattaaatgattatggtttttacaccactactggcattggctaccaaccttacagagttgtagtactttcttttgaacttttaaatgcaccggccacggtttgtggaccaaaattatccactgaccttattaagaaccagtgtgtcaattttaattttaatggactcactggtactggtgtgttaactccttcttcaaagagatttcaaccatttcaacaatttggccgtgatgtttctgatttcactgattccgttcgagatcctaaaacatctgaaatattagacatttcaccttgctcttttgggggtgtaagtgtaattacacctggaacaaatgcttcatctgaagttgctgttctatatcaagatgttaactgcactgatgtttctacagcaattcatgcagatcaactcacaccagcttggcgcatatattctactggaaacaatgtattccagactcaagcaggctgtcttataggagctgagcatgtcgacacttcttatgagtgcgacattcctattggagctggcatttgtgctagttaccatacagtttctttattacgtagtactagccaaaaatctattgtggcttatactatgtctttaggtgctgatagttcaattgcttactctaataacaccattgctatacctactaacttttcaattagcattactacagaagtaatgcctgtttctatggctaaaacctccgtagattgtaatatgtacatctgcggagattctactgaatgtgctaatttgcttctccaatatggtagcttttgcacacaactaaatcgtgcactctcaggtattgctgctgaacaggatcgcaacacacgtgaagtgttcgctcaagtcaaacaaatgtacaaaaccccaactttgaaatattttggtggttttaatttttcacaaatattacctgaccctctaaagccaactaagaggtcttttattgaggacttgctctttaataaggtgacactcgctgatgctggcttcatgaagcaatatggcgaatgcctaggtgatattaatgctagagatctcatttgtgcgcagaagttcaatggacttacagtgttgccacctctgctcactgatgatatgattgctgcctacactgctgctctagttagtggtactgccactgctggatggacatttggtgctggcgctgctcttcaaataccttttgctatgcaaatggcatataggttcaatggcattggagttacccaaaatgttctctatgagaaccaaaaacaaatcgccaaccaatttaacaaggcgattagtcaaattcaagaatcacttacaacaacatcaactgcattgggcaagctgcaagacgttgttaaccagaatgctcaagcattaaacacacttgttaaacaacttagctctaattttggtgcaatttcaagtgtgctaaatgatatcctttcgcgacttgataaagtcgaggcggaggtacaaattgacaggttaattacaggcagacttcaaagccttcaaacctatgtaacacaacaactaatcagggctgctgaaatcagggcttctgctaatcttgctgctactaaaatgtctgagtgtgttcttggacaatcaaaaagagttgacttttgtggaaagggctaccaccttatgtccttcccacaagcagccccgcatggtgttgtcttcctacatgtcacgtatgtgccatcccaggagaggaacttcaccacagcgccagcaatttgtcatgaaggcaaagcatacttccctcgtgaaggtgtttttgtgtttaatggcacttcttggtttattacacagaggaacttcttttctccacaaataattactacagacaatacatttgtctcaggaaattgtgatgtcgttattggcatcattaacaacacagtttatgatcctctgcaacctgagctcgactcattcaaagaagagctggacaagtacttcaaaaatcatacatcaccagatgttgatcttggcgacatttcaggcattaacgcttctgtcgtcaacattcaaaaagaaattgaccgcctcaatgaggtcgctaaaaatttaaatgaatcactcattgaccttcaagaattgggaaaatatgagcaatatattaaatggccttggtatgtttggctcggcttcattgctggactaattgccatcgtcatggttacaatcttgctttgttgcatgactagttgttgcagttgcctcaagggtgcatgctcttgtggttcttgctgcaagtttgatgaggatgactctgagccagttctcaagggtgtcaaattacattacacataaacgaacttatggatttgtttatgagattttttactcttggatcaattactgcacagccagtaaaaattgacaatgcttctcctgcaagtactgttcatgctacagcaacgataccgctacaagcctcactccctttcggatggcttgttattggcgttgcatttcttgctgtttttcagagcgctaccaaaataattgcgctcaataaaagatggcagctagccctttataagggcttccagttcatttgcaatttactgctgctatttgttaccatctattcacatcttttgcttgtcgctgcaggtatggaggcgcaatttttgtacctctatgccttgatatattttctacaatgcatcaacgcatgtagaattattatgagatgttggctttgttggaagtgcaaatccaagaacccattactttatgatgccaactactttgtttgctggcacacacataactatgactactgtataccatataacagtgtcacagatacaattgtcgttactgaaggtgacggcatttcaacaccaaaactcaaagaagactaccaaattggtggttattctgaggataggcactcaggtgttaaagactatgtcgttgtacatggctatttcaccgaagtttactaccagcttgagtctacacaaattactacagacactggtattgaaaatgctacattcttcatctttaacaagcttgttaaagacccaccgaatgtgcaaatacacacaatcgacggctcttcaggagttgctaatccagcaatggatccaatttatgatgagccgacgacgactactagcgtgcctttgtaagcacaagaaagtgagtacgaacttatgtactcattcgtttcggaagaaacaggtacgttaatagttaatagcgtacttctttttcttgctttcgtggtattcttgctagtcacactagccatccttactgcgcttcgattgtgtgcgtactgctgcaatattgttaacgtgagtttagtaaaaccaacggtttacgtctactcgcgtgttaaaaatctgaactcttctgaaggagttcctgatcttctggtctaaacgaactaactattattattattctgtttggaactttaacattgcttatcatggcagacaacggtactattaccgttgaggagcttaaacaactcctggaacaatggaacctagtaataggtttcctattcctagcctggattatgttactacaatttgcctattctaatcggaacaggtttttgtacataataaagcttgttttcctctggctcttgtggccagtaacacttgcttgttttgtgcttgctgctgtctacagaattaattgggtgactggcgggattgcgattgcaatggcttgtattgtaggcttgatgtggcttagctacttcgttgcttccttcaggctgtttgctcgtacccgctcaatgtggtcattcaacccagaaacaaacattcttctcaatgtgcctctccgggggacaattgtgaccagaccgctcatggaaagtgaacttgtcattggtgctgtgatcattcgtggtcacttgcgaatggccggacaccccctagggcgctgtgacattaaggacctgccaaaagagatcactgtggctacatcacgaacgctttcttattacaaattaggagcgtcgcagcgtgtaggcactgattcaggttttgctgcatacaaccgctaccgtattggaaactataaattaaatacagaccacgccggtagcaacgacaatattgctttgctagtacagtaagtgacaacagatgtttcatcttgttgacttccaggttacaatagcagagatattgattatcattatgaggactttcaggattgctatttggaatcttgacgttataataagttcaatagtgagacaattatttaagcctctaactaagaagaattattcggagttagatgatgaagaacctatggagttagattatccataaaacgaacatgaaaattattctcttcctgacattgattgtatttacatcttgcgagctatatcactatcaggagtgtgttagaggtacgactgtactactaaaagaaccttgcccatcaggaacatacgagggcaattcaccatttcaccctcttgctgacaataaatttgcactaacttgcactagcacacactttgcttttgcttgtgctgacggtactcgacatacctatcagctgcgtgcaagatcagtttcaccaaaacttttcatcagacaagaggaggttcaacaagagctctactcgccactttttctcattgttgctgctctagtatttttaatactttgcttcaccattaagagaaagacagaatgaatgagctcactttaattgacttctatttgtgctttttagcctttctgctattccttgttttaataatgcttattatattttggttttcactcgaaatccaggatctagaagaaccttgtaccaaagtctaaacgaacatgaaacttctcattgttttgacttgtatttctctatgcagttgcatatgcactgtagtacagcgctgtgcatctaataaacctcatgtgcttgaagatccttgtaaggtacaacactaggggtaatacttatagcactgcttggctttgtgctctaggaaaggttttaccttttcatagatggcacactatggttcaaacatgcacacctaatgttactatcaactgtcaagatccagctggtggtgcgcttatagctaggtgttggtaccttcatgaaggtcaccaaactgctgcatttagagacgtacttgttgttttaaataaacgaacaaattaaaatgtctgataatggaccccaatcaaaccaacgtagtgccccccgcattacatttggtggacccacagattcaactgacaataaccagaatggaggacgcaatggggcaaggccaaaacagcgccgaccccaaggtttacccaataatactgcgtcttggttcacagctctcactcagcatggcaaggaggaacttagattccctcgaggccagggcgttccaatcaacaccaatagtggtccagatgaccaaattggctactaccgaagagctacccgacgagttcgtggtggtgacggcaaaatgaaagagctcagccccagatggtacttctattacctaggaactggcccagaagcttcacttccctacggcgctaacaaagaaggcatcgtatgggttgcaactgagggagccttgaatacacccaaagaccacattggcacccgcaatcctaataacaatgctgccaccgtgctacaacttcctcaaggaacaacattgccaaaaggcttctacgcagagggaagcagaggcggcagtcaagcctcttctcgctcctcatcacgtagtcgcggtaattcaagaaattcaactcctggcagcagtaggggaaattctcctgctcgaatggctagcggaggtggtgaaactgccctcgcgctattgctgctagacagattgaaccagcttgagagcaaagtttctggtaaaggccaacaacaacaaggccaaactgtcactaagaaatctgctgctgaggcatctaaaaagcctcgccaaaaacgtactgccacaaaacagtacaacgtcactcaagcatttgggagacgtggtccagaacaaacccaaggaaatttcggggaccaagacctaatcagacaaggaactgattacaaacattggccgcaaattgcacaatttgctccaagtgcctctgcattctttggaatgtcacgcattggcatggaagtcacaccttcgggaacatggctgacttatcatggagccattaaattggatgacaaagatccacaattcaaagacaacgtcatactgctgaacaagcacattgacgcatacaaaacattcccaccaacagagcctaaaaaggacaaaaagaaaaagactgatgaagctcagcctttgccgcagagacaaaagaagcagcccactgtgactcttcttcctgcggctgacatggatgatttctccagacaacttcaaaattccatgagtggagcttctgctgattcaactcaggcataaacactcatgatgaccacacaaggcagatgggctatgtaaacgttttcgcaattccgtttacgatacatagtctactcttgtgcagaatgaattctcgtaactaaacagcacaagtaggtttagttaactttaatctcacatagcaatctttaatcaatgtgtaacattagggaggacttgaaagagccaccacattttcatcgaggccacgcggagtacgatcgagggtacagtgaataatgctagggagagctgcctatatggaagagccctaatgtgtaaaattaattttagtagtgctatccccatgtgattttaatagcttcttaggagaatgac
